(19) United States
(12) Patent Application Publication
(10) Pub. No.: US 2003/0165891 A1
(43) Pub. Date: Sep. 4, 2003

(54) Novel TWIK-6, TWIK-7, IC23927, TWIK-8, IC47611, IC47615, HNMDA-1, TWIK-9 alpha2delta-4, 54414, and 53763 molecules and uses therefor

(75) Inventors: Rory A.J. Curtis, Framingham, MA (US); Maria Alexandra Glucksmann, Lexington, MA (US); Inmaculada Silos-Santiago, Cambridge, MA (US)

Correspondence Address: LAHIVE & COCKFIELD, 28 STATE STREET, BOSTON, MA, 02109, US

(73) Assignee: Millennium Pharmaceuticals, Inc., Cambridge, MA (US)

(21) Appl. No.: 10/146,733

(22) Filed: May 15, 2002

Related U.S. Application Data
(63) Continuation of application No. 09/518,866, filed on Mar. 3, 2000, now abandoned.
(63) Continuation of application No. 09/515,520, filed on Feb. 29, 2000.
(63) Continuation of application No. 09/796,720, filed on Feb. 28, 2001.
(63) Continuation of application No. 09/828,035, filed on Apr. 6, 2001.
(63) Continuation of application No. 09/833,081, filed on Apr. 11, 2001.
(63) Continuation of application No. 09/843,128, filed on Apr. 25, 2001.
(63) Continuation of application No. 09/957,683, filed on Sep. 19, 2001.
(63) Continuation of application No. 09/964,252, filed on Sep. 25, 2001.
(63) Continuation of application No. 09/964,256, filed on Sep. 25, 2001.
(63) Continuation of application No. 10/024,623, filed on Dec. 17, 2001.
(60) Provisional application No. 60/185,938, filed on Feb. 29, 2000.
(60) Provisional application No. 60/195,734, filed on Apr. 7, 2000.
(60) Provisional application No. 60/195,993, filed on Apr. 11, 2000.
(60) Provisional application No. 60/199,799, filed on Apr. 26, 2000.
(60) Provisional application No. 60/233,537, filed on Sep. 19, 2000.
(60) Provisional application No. 60/235,059, filed on Sep. 25, 2000.
(60) Provisional application No. 60/235,018, filed on Sep. 25, 2000.
(60) Provisional application No. 60/256,240, filed on Dec. 15, 2000.
(60) Provisional application No. 60/256,588, filed on Dec. 18, 2000.
(60) Provisional application No. 60/258,028, filed on Dec. 21, 2000.

(51) Int. Cl. C12Q 1/68; G01N 33/53; G01N 33/567; C07H 21/04; C12N 9/12; C12P 21/02; C12N 5/06; C07K 14/705; C07K 16/28

(52) U.S. Cl. 435/6; 435/69.1; 435/194; 435/320.1; 435/325; 530/350; 536/23.2; 530/388.22; 435/7.2

(57) ABSTRACT

The invention provides isolated nucleic acids molecules, designated TWIK-6, TWIK-7, IC23927, TWIK-8, IC47611, IC47615, HNMDA-1, TWIK-9, α₂δ-4, 54414, and 53763 nucleic acid molecules, which encode novel ion channel family molecules, including calcium channels, potassium channels, and NMDA receptors. The invention also provides antisense nucleic acid molecules, recombinant expression vectors containing TWIK-6, TWIK-7, IC23927, TWIK-8, IC47611, IC47615, HNMDA-1, TWIK-9, α₂δ-4, 54414, and 53763 nucleic acid molecules, host cells into which the expression vectors have been introduced, and non-human transgenic animals in which a TWIK-6, TWIK-7, IC23927, TWIK-8, IC47611, IC47615, HNMDA-1, TWIK-9, α₂δ-4, 54414, or 53763 gene has been introduced or disrupted. The invention still further provides isolated TWIK-6, TWIK-7, IC23927, TWIK-8, IC47611, IC47615, HNMDA-1, TWIK-9, α₂δ-4, 54414, and 53763 polypeptides, fusion polypeptides, antigenic peptides and anti-TWIK-6, TWIK-7, IC23927, TWIK-8, IC47611, IC47615, HNMDA-1, TWIK-9, α₂δ-4, 54414, and 53763 antibodies. Diagnostic and therapeutic methods utilizing compositions of the invention are also provided.

### RELATED APPLICATIONS

[0001] This application is a continuation-in-part of U.S. patent application Ser. No. 09/518,866, filed Mar. 3, 2000 (pending).

[0002] This application is also a continuation-in-part of U.S. patent application Ser. No. 09/515,520, filed Feb. 29, 2000 (pending).

[0003] This application is also a continuation-in-part of U.S. patent application Ser. No. 09/796,720, filed Feb. 28, 2001 (pending), which claims the benefit of U.S. Provisional Application Serial No. 60/185,938, filed Feb. 29, 2000.

[0004] This application is also a continuation-in-part of U.S. patent application Ser. No. 09/828,035, filed Apr. 6, 2001 (pending), which claims the benefit of U.S. Provisional Application Serial No. 60/195,734, filed Apr. 7, 2000.

[0005] This application is also a continuation-in-part of U.S. patent application Ser. No. 09/833,081, filed Apr. 11, 2001 (pending), which claims the benefit of U.S. Provisional Application Serial No. 60/195,993, filed Apr. 11, 2000.

[0006] This application is also a continuation-in-part of U.S. patent application Ser. No. 09/843,128, filed Apr. 25, 2001 (pending), which claims the benefit of U.S. Provisional Application Serial No. 60/199,799, filed Apr. 26, 2000.

[0007] This application is also a continuation-in-part of U.S. patent application Ser. No. 09/957,683, filed Sep. 19, 2001 (pending), which claims the benefit of U.S. Provisional Application Serial No. 60/233,537, filed Sep. 19, 2000.

[0008] This application is also a continuation-in-part of U.S. patent application Ser. No. 09/964,252, filed Sep. 25, 2001 (pending), which claims the benefit of U.S. Provisional Application Serial No. 60/235,059, filed Sep. 25, 2000.

[0009] This application is also a continuation-in-part of U.S. patent application Ser. No. 09/964,256, filed Sep. 25, 2001 (pending), which claims the benefit of U.S. Provisional Application Serial No. 60/235,018, filed Sep. 25, 2000.

[0010] This application is also a continuation-in-part of U.S. patent application Ser. No. 10/024,623, filed Dec. 17, 2001 (pending), which claims the benefit of U.S. Provisional Application Serial No. 60/256,240, filed Dec. 15, 2000, U.S. Provisional Application Serial No. 60/256,588, filed Dec. 18, 2000, and U.S. Provisional Application Serial No. 60/258,028, filed Dec. 21, 2000.

[0011] The entire contents of each of the above-referenced patent applications are incorporated herein by this reference.

INDEX

| Chapter | Page | Title |
|---|---|---|
| I. | 2 | A NOVEL POTASSIUM CHANNEL MOLECULE |
| | | AND USES THEREFOR |
| II. | 86 | NUCLEIC ACIDS ENCODING TWIK-7, A NOVEL |
| | | POTASSIUM CHANNEL PROTEIN |
| III. | 160 | 23927, A NOVEL HUMAN ION CHANNEL |
| IV. | 244 | 12303, A NOVEL HUMAN TWIK MOLECULE AND |
| | | USES THEREOF |
| V. | 325 | 47611, A NOVEL HUMAN ION CHANNEL AND |
| | | USES THEREOF |
| VI. | 402 | 47615, A NOVEL HUMAN ION CHANNEL AND |
| | | USES THEREOF |
| VII. | 477 | 55063, A NOVEL HUMAN NMDA FAMILY |
| | | MEMBER AND USES THEREOF |
| VIII. | 553 | 56115, A NOVEL HUMAN TWIK POTASSIUM |
| | | CHANNEL AND USES THEREFOR |
| IX. | 635 | 25658, A NOVEL HUMAN CALCIUM CHANNEL |
| | | SUBUNIT AND USES THEREOF |
| X. | 713 | 8099, 46455, 54414, 53763, 67076, 67102, 44181, |
| | | 67084FL, AND 67084 ALT, HUMAN PROTEINS AND |
| | | METHODS OF USE THEREOF |

### I. A NOVEL POTASSIUM CHANNEL MOLECULE AND USES THEREFOR

### Background of the Invention

[0012] Potassium (K⁺) channels are ubiquitous proteins which are involved in the setting of the resting membrane potential as well as in the modulation of the electrical activity of cells. In excitable cells, K⁺ channels influence action potential waveforms, firing frequency, and neurotransmitter secretion (Rudy, B. (1988) Neuroscience, 25, 729-749; Hille, B. (1992) Ionic Channels of Excitable Membranes, 2nd Ed.). In non-excitable cells, they are involved in hormone secretion, cell volume regulation and potentially in cell proliferation and differentiation (Lewis et al. (1995) Annu. Rev. Immunol., 13, 623-653). Developments in electrophysiology have allowed the identification and the characterization of an astonishing variety of K⁺ channels that differ in their biophysical properties, pharmacology, regulation and tissue distribution (Rudy, B. (1988) Neuroscience, 25, 729-749; Hille, B. (1992) Ionic Channels of Excitable Membranes, 2nd Ed.). More recently, cloning efforts have shed considerable light on the mechanisms that determine this functional diversity. Furthermore, analyses of structure-function relationships have provided an important set of data concerning the molecular basis of the biophysical properties (selectivity, gating, assembly) and the pharmacological properties of cloned K⁺ channels.

[0013] Functional diversity of K⁺ channels arises mainly from the existence of a great number of genes coding for pore-forming subunits, as well as for other associated regulatory subunits. Two main structural families of pore-forming subunits have been identified. The first one consists of subunits with a conserved hydrophobic core containing six transmembrane domains (TMDs). These K⁺ channel α subunits participate in the formation of outward rectifier voltage-gated (Kv) and Ca²⁺-dependent K⁺ channels. The fourth TMD contains repeated positive charges involved in the voltage gating of these channels and hence in their outward rectification (Logothetis et al. (1992) Neuron, 8, 531-540; Bezanilla et al. (1994) Biophys. J. 66, 1011-1021).

[0014] The second family of pore-forming subunits have only two TMDs. They are essential subunits of inward-rectifying (IRK), G-protein-coupled (GIRK) and ATP-sensitive (K_{ATP}) K⁺ channels. The inward rectification results from a voltage-dependent block by cytoplasmic Mg²⁺ and polyamines (Matsuda, H. (1991) Annu. Rev. Physiol., 53, 289-298). A conserved domain, called the P domain, is present in all members of both families (Pongs, O. (1993) J. Membr. Biol., 136, 1-8; Heginbotham et al. (1994) Biophys. J. 66,1061-1067; Mackinnon, R. (1995) Neuron, 14, 889-892; Pascual et al., (1995) Neuron., and 14, 1055-1063). This domain is an essential element of the aqueous K⁺-selective pore. In both groups, the assembly of four subunits is necessary to form a functional K⁺ channel (Mackinnon, R. (1991) Nature, 350, 232-235; Yang et al., (1995) Neuron, 15, 1441-1447.

[0015] In both six TMD and two TMD pore-forming subunit families, different subunits coded by different genes can associate to form heterotetramers with new channel properties (Isacoff et al., (1990) Nature, 345, 530-534). A selective formation of heteropolymeric channels may allow each cell to develop the best K⁺ current repertoire suited to its function. Pore-forming α subunits of Kv channels are classified into different subfamilies according to their sequence similarity (Chandy et al. (1993) Trends Pharmacol. Sci., 14, 434). Tetramerization is believed to occur preferentially between members of each subgroup (Covarrubias et al. (1991) Neuron, 7, 763-773). The domain responsible for this selective association is localized in the N-terminal region and is conserved between members of the same subgroup. This domain is necessary for hetero- but not homomultimeric assembly within a subfamily and prevents co-assembly between subfamilies. Recently, pore-forming subunits with two TMDs were also shown to co-assemble to form heteropolymers (Duprat et al. (1995) Biochem. Biophys. Res. Commun., 212, 657-663. This heteropolymerization seems necessary to give functional GIRKs. IRKs are active as homopolymers but also form heteropolymers.

[0016] New structural types of K⁺ channels were identified recently in both humans and yeast. These channels have two P domains in their functional subunit instead of only one (Ketchum et al. (1995) Nature, 376, 690-695; Lesage et al. (1996) J. Biol. Chem, 271, 4183-4187; Lesage et al. (1996) EMBO J., 15, 1004-1011; Reid et al. (1996) Receptors Channels 4, 51-62). The human channel called TWIK-1, has four TMDs. TWIK-1 is expressed widely in human tissues and is particularly abundant in the heart and the brain. TWIK-1 currents are time independent and inwardly rectifying. These properties suggest that TWIK-1 channels are involved in the control of the background K⁺ membrane conductance (Lesage et al. (1996) EMBO J., 15, 1004-1011).

### SUMMARY OF THE INVENTION

[0017] The present invention is based, at least in part, on the discovery of novel members of the TWIK (for Tandem of P domains in a Weak Inward rectifying K⁺ channel) family of potassium channels, referred to herein as TWIK-6 nucleic acid and protein molecules. The TWIK-6 molecules of the present invention are useful as targets for developing modulating agents to regulate a variety of cellular processes. Accordingly, in one aspect, this invention provides isolated nucleic acid molecules encoding TWIK proteins or biologically active portions thereof, as well as nucleic acid fragments suitable as primers or hybridization probes for the detection of TWIK-encoding nucleic acids.

[0018] In one embodiment, a TWIK-6 nucleic acid molecule of the invention is at least 50%, 55%, 60%, 65%, 70%, 73%, 74%, 75%, 80%, 85%, 90%, 95%, 96%, 97%, 98%, 99% or more identical to the nucleotide sequence (e.g., to the entire length of the nucleotide sequence) shown in SEQ ID NO:1 or 3 or SEQ ID NO:4 or 6 or the nucleotide sequence of the DNA insert of the plasmid deposited with ATCC as Accession Number ______, or a complement thereof.

[0019] In a preferred embodiment, the isolated nucleic acid molecule includes the nucleotide sequence shown SEQ ID NO:1 or 3, or SEQ ID NO:4 or 6, or a complement thereof. In another embodiment, the nucleic acid molecule includes SEQ ID NO:3 or 6 and nucleotides 1-102 of SEQ ID NO:1 or 4. In yet another embodiment, the nucleic acid molecule includes SEQ ID NO:3 or 6 and nucleotides 1306-1528 of SEQ ID NO:1 or 4. In another preferred embodiment, the nucleic acid molecule consists of the nucleotide sequence shown in SEQ ID NO:1 or 3 or SEQ ID NO:4 or 6. In another preferred embodiment, the nucleic acid molecule includes a fragment of at least 1051 nucleotides (e.g., 1051 contiguous nucleotides) of the nucleotide sequence of SEQ ID NO: 1 or 3 or SEQ ID NO:4 or 6, or a complement thereof.

[0020] In another embodiment, a TWIK-6 nucleic acid molecule includes a nucleotide sequence encoding a protein having an amino acid sequence sufficiently identical to the amino acid sequence of SEQ ID NO:2 or 5 or an amino acid sequence encoded by the DNA insert of the plasmid deposited with ATCC as Accession Number ______. In a preferred embodiment, a TWIK-6 nucleic acid molecule includes a nucleotide sequence encoding a protein having an amino acid sequence at least 50%, 55%, 60%, 65%, 67%, 68%, 70%, 75%, 80%, 85%, 90%, 95%, 96%, 97%, 98%, 99% or more identical to the entire length of the amino acid sequence of SEQ ID NO:2 or 5 or the amino acid sequence encoded by the DNA insert of the plasmid deposited with ATCC as Accession Number ______.

[0021] In another preferred embodiment, an isolated nucleic acid molecule encodes the amino acid sequence of human TWIK-6. In yet another preferred embodiment, the nucleic acid molecule includes a nucleotide sequence encoding a protein having the amino acid sequence of SEQ ID NO:2 or 5 or the amino acid sequence encoded by the DNA insert of the plasmid deposited with ATCC as Accession Number ______. In yet another preferred embodiment, the nucleic acid molecule is at least 1051 nucleotides in length. In a further preferred embodiment, the nucleic acid molecule is at least 1051 nucleotides in length and encodes a protein having a TWIK-6 activity (as described herein).

[0022] Another embodiment of the invention features nucleic acid molecules, preferably TWIK-6 nucleic acid molecules, which specifically detect TWIK-6 nucleic acid molecules relative to nucleic acid molecules encoding non-TWIK-6 proteins. For example, in one embodiment, such a nucleic acid molecule is at least 1050, 1051-1100, 1100-1150, 1150-1200, 1200-1250, 1250-1300, 1300-1350, 1350-1400, 1400-1450, 1450-1500, or more nucleotides in length and hybridizes under stringent conditions to a nucleic acid molecule comprising the nucleotide sequence shown in SEQ ID NO:1 or 4, the nucleotide sequence of the DNA insert of the plasmid deposited with ATCC as Accession Number ______, or a complement thereof.

[0023] In preferred embodiments, the nucleic acid molecules are at least 15 (e.g., 15 contiguous) nucleotides in length and hybridize under stringent conditions to nucleotides 1-156 of SEQ ID NO:1 or 4. In other preferred embodiments, the nucleic acid molecules comprise nucleotides 1-156 of SEQ ID NO:1 or 4.

[0024] In other preferred embodiments, the nucleic acid molecule encodes a naturally occurring allelic variant (e.g., an allelic variant as described in Example 1, where a single base change of A to G at nucleotide position 596 was identified) of a polypeptide comprising the amino acid sequence of SEQ ID NO:2 or an amino acid sequence encoded by the DNA insert of the plasmid deposited with ATCC as Accession Number ______, wherein the nucleic acid molecule hybridizes to a nucleic acid molecule comprising SEQ ID NO:1 or 3 or SEQ ID NO:4 or 6 under stringent conditions.

[0025] Another embodiment of the invention provides an isolated nucleic acid molecule which is antisense to a TWIK-6 nucleic acid molecule, e.g., the coding strand of a TWIK-6 nucleic acid molecule.

[0026] Another aspect of the invention provides a vector comprising a TWIK-6 nucleic acid molecule. In certain embodiments, the vector is a recombinant expression vector. In another embodiment, the invention provides a host cell containing a vector of the invention. In yet another embodiment, the invention provides a host cell containing a nucleic acid molecule of the invention. The invention also provides a method for producing a protein, preferably a TWIK-6 protein, by culturing in a suitable medium, a host cell, e.g., a mammalian host cell such as a non-human mammalian cell, of the invention containing a recombinant expression vector, such that the protein is produced.

[0027] Another aspect of this invention features isolated or recombinant TWIK-6 proteins and polypeptides. In one embodiment, an isolated TWIK-6 protein includes at least one transmembrane domain. In yet another embodiment, an isolated TWIK-6 protein includes a TWIK-related ion channel domain. In yet another embodiment, an isolated TWIK-6 protein includes a potassium channel protein domain. In yet another embodiment, an isolated TWIK-6 protein includes a P-loop domain. In yet another embodiment, an isolated TWIK-6 protein includes at least one transmembrane domain and one or more of the following domains: a TWIK-related ion channel domain, a P-loop domain, and a potassium channel protein domain. In yet another embodiment, an isolated TWIK-6 protein includes at least one transmembrane domain, a TWIK-related ion channel domain, a P-loop domain, and a potassium channel protein domain.

[0028] In a preferred embodiment, a TWIK-6 protein includes at least one transmembrane domain and has an amino acid sequence at least about 50%, 55%, 60%, 65%, 67%, 68%, 70%, 75%, 80%, 85%, 90%, 95%, 96%, 97%, 98%, 99% or more identical to the amino acid sequence of SEQ ID NO:2 or 5, or the amino acid sequence encoded by the DNA insert of the plasmid deposited with ATCC as Accession Number ______. In a further preferred embodiment, a TWIK-6 protein includes a TWIK-related ion channel domain and has an amino acid sequence at least about 50%, 55%, 60%, 65%, 70%, 75%, 80%, 85%, 90%, 95%, 96%, 97%, 98%, 99% or more identical to the amino acid sequence of SEQ ID NO:2 or 5, or the amino acid sequence encoded by the DNA insert of the plasmid deposited with ATCC as Accession Number ______. In a further preferred embodiment, a TWIK-6 protein includes a potassium channel protein domain and has an amino acid sequence at least about 50%, 55%, 60%, 65%, 70%, 75%, 80%, 85%, 90%, 95%, 96%, 97%, 98%, 99% or more identical to the amino acid sequence of SEQ ID NO:2 or 5, or the amino acid sequence encoded by the DNA insert of the plasmid deposited with ATCC as Accession Number ______. In a further preferred embodiment, a TWIK-6 protein includes at least one P-loop domain and has an amino acid sequence at least about 50%, 55%, 60%, 65%, 70%, 75%, 80%, 85%, 90%, 95%, 96%, 97%, 98%, 99% or more identical to the amino acid sequence of SEQ ID NO:2 or 5, or the amino acid sequence encoded by the DNA insert of the plasmid deposited with ATCC as Accession Number ______. In a further preferred embodiment, a TWIK-6 protein includes at least one transmembrane domain and one or more of a TWIK-related ion channel domain,, a P-loop domain, and/or a potassium channel protein domain, and has an amino acid sequence at least about 50%, 55%, 60%, 65%, 70%, 75%, 80%, 85%, 90%, 95%, 96%, 97%, 98%, 99% or more identical to the amino acid sequence of SEQ ID NO:2 or 5, or the amino acid sequence encoded by the DNA insert of the plasmid deposited with ATCC as Accession Number ______.

[0029] In another preferred embodiment, a TWIK-6 protein includes at least one transmembrane domain and has a TWIK-6 activity (as described herein).

[0030] In yet another preferred embodiment, a TWIK-6 protein includes at least one transmembrane domain and is encoded by a nucleic acid molecule having a nucleotide sequence which hybridizes under stringent hybridization conditions to a nucleic acid molecule comprising the nucleotide sequence of SEQ ID NO:1 or 3 or SEQ ID NO:4 or 6. In a further embodiment, a TWIK-6 protein includes a TWIK-related ion channel domain and is encoded by a nucleic acid molecule having a nucleotide sequence which hybridizes under stringent hybridization conditions to a nucleic acid molecule comprising the nucleotide sequence of SEQ ID NO:1 or 3 or 4 or 6. In a further embodiment, a TWIK-6 protein includes a P-loop domain and is encoded by a nucleic acid molecule having a nucleotide sequence which hybridizes under stringent hybridization conditions to a nucleic acid molecule comprising the nucleotide sequence of SEQ ID NO:1 or 3 or SEQ ID NO:4 or 6. In a further embodiment, a TWIK-6 protein includes a potassium channel protein domain and is encoded by a nucleic acid molecule having a nucleotide sequence which hybridizes under stringent hybridization conditions to a nucleic acid molecule comprising the nucleotide sequence of SEQ ID NO:1 or 3 or SEQ ID NO:4 or 6. In another embodiment, a TWIK-6 protein includes at least one transmembrane domain and one or more of a TWIK-related ion channel domain, a P-loop domain, and/or a potassium channel protein domain, and is encoded by a nucleic acid molecule having a nucleotide sequence which hybridizes under stringent hybridization conditions to a nucleic acid molecule comprising the nucleotide sequence of SEQ ID NO: 1 or 3 or SEQ ID NO:4 or 6.

[0031] In another embodiment, the invention features fragments of the protein having the amino acid sequence of SEQ ID NO:2 or 5, wherein the fragment comprises at least 19 amino acids (e.g., contiguous amino acids) of the amino acid sequence of SEQ ID NO:2 or 5, or an amino acid sequence encoded by the DNA insert of the plasmid deposited with the ATCC as Accession Number ______. In another embodiment, a TWIK-6 protein has the amino acid sequence of SEQ ID NO:2 or 5.

[0032] In another embodiment, the invention features a TWIK-6 protein which is encoded by a nucleic acid molecule consisting of a nucleotide sequence at least about 50%, 55%, 60%, 65%, 70%, 73%, 74%, 75%, 80%, 85%, 90%, 95%, 96%, 97%, 98%, 99% or more identical to a nucleotide sequence of SEQ ID NO:1 or 3, or SEQ ID NO:4 or 6, or a complement thereof. This invention further features a TWIK-6 protein, which is encoded by a nucleic acid molecule consisting of a nucleotide sequence which hybridizes under stringent hybridization conditions to a nucleic acid molecule comprising the nucleotide sequence of SEQ ID NO:1 or 3, or SEQ ID NO:4 or 6, or a complement thereof.

[0033] The proteins of the present invention or portions thereof, e.g., biologically active portions thereof, can be operatively linked to a non-TWIK-6 polypeptide (e.g., heterologous amino acid sequences) to form fusion proteins. The invention further features antibodies, such as monoclonal or polyclonal antibodies, that specifically bind proteins of the invention, preferably TWIK-6 proteins. In addition, the TWIK-6 proteins or biologically active portions thereof can be incorporated into pharmaceutical compositions, which optionally include pharmaceutically acceptable carriers.

[0034] In another aspect, the present invention provides a method for detecting the presence of a TWIK-6 nucleic acid molecule, protein, or polypeptide in a biological sample by contacting the biological sample with an agent capable of detecting a TWIK-6 nucleic acid molecule, protein, or polypeptide such that the presence of a TWIK-6 nucleic acid molecule, protein or polypeptide is detected in the biological sample.

[0035] In another aspect, the present invention provides a method for detecting the presence of TWIK-6 activity in a biological sample by contacting the biological sample with an agent capable of detecting an indicator of TWIK-6 activity such that the presence of TWIK-6 activity is detected in the biological sample.

[0036] In another aspect, the invention provides a method for modulating TWIK-6 activity comprising contacting a cell capable of expressing TWIK-6 with an agent that modulates TWIK-6 activity such that TWIK-6 activity in the cell is modulated. In one embodiment, the agent inhibits TWIK-6 activity. In another embodiment, the agent stimulates TWIK-6 activity. In one embodiment, the agent is an antibody that specifically binds to a TWIK-6 protein. In another embodiment, the agent modulates expression of TWIK-6 by modulating transcription of a TWIK-6 gene or translation of a TWIK-6 mRNA. In yet another embodiment, the agent is a nucleic acid molecule having a nucleotide sequence that is antisense to the coding strand of a TWIK-6 mRNA or a TWIK-6 gene.

[0037] In one embodiment, the methods of the present invention are used to treat a subject having a disorder characterized by aberrant or unwanted TWIK-6 protein or nucleic acid expression or activity by administering an agent which is a TWIK-6 modulator to the subject. In one embodiment, the TWIK-6 modulator is a TWIK-6 protein. In another embodiment the TWIK-6 modulator is a TWIK-6 nucleic acid molecule. In yet another embodiment, the TWIK-6 modulator is a peptide, peptidomimetic, or other small molecule. In a preferred embodiment, the disorder characterized by aberrant or unwanted TWIK-6 protein or nucleic acid expression is a CNS disorder, such as a cognitive or neurodegenerative disorder. In another preferred embodiment, the disorder characterized by aberrant or unwanted TWIK-6 protein or nucleic acid expression is a cardiovascular disorder. In another preferred embodiment, the disorder characterized by aberrant or unwanted TWIK-6 protein or nucleic acid expression is a muscular disorder. In another embodiment, the disorder characterized by aberrant or unwanted TWIK-6 activity is a cell proliferation, growth, differentiation, or migration disorder.

[0038] The present invention also provides diagnostic assays for identifying the presence or absence of a genetic alteration characterized by at least one of (i) aberrant modification or mutation of a gene encoding a TWIK-6 protein; (ii) mis-regulation of the gene; and (iii) aberrant post-translational modification of a TWIK-6 protein, wherein a wild-type form of the gene encodes a protein with a TWIK-6 activity.

[0039] In another aspect the invention provides methods for identifying a compound that binds to or modulates the activity of a TWIK-6 protein, by providing an indicator composition comprising a TWIK-6 protein having TWIK-6 activity, contacting the indicator composition with a test compound, and determining the effect of the test compound on TWIK-6 activity in the indicator composition to identify a compound that modulates the activity of a TWIK-6 protein.

[0040] Other features and advantages of the invention will be apparent from the following detailed description and claims.

### BRIEF DESCRIPTION OF THE DRAWINGS

[0041] FIGS. 1A-1B depict the cDNA sequence and predicted amino acid sequence of human TWIK-6 (A⁵⁹⁶). The nucleotide sequence corresponds to nucleic acids 1 to 1528 of SEQ ID NO:1. The amino acid sequence corresponds to amino acids 1 to 400 of SEQ ID NO:2. The coding region without the 3′ untranslated region of the human TWIK-6 gene is shown in SEQ ID NO:3.

[0042] FIGS. 2A-2B depict the cDNA sequence and predicted amino acid sequence of human TWIK-6 (G⁵⁹⁶) containing an A to G polymorphism at nucleotide 596. The nucleotide sequence corresponds to nucleic acids 1 to 1528 of SEQ ID NO:4. The amino acid sequence corresponds to amino acids 1 to 400 of SEQ ID NO:5. The coding region without the 3′ untranslated region of the human TWIK-6 gene is shown in SEQ ID NO: 6.

[0043] FIG. 3 depicts a structural, hydrophobicity, and antigenicity analysis of the human TWIK-6 protein.

[0044] FIGS. 4A-4B depict an NBLAST alignment of the human TWIK-6 nucleic acid sequence (SEQ ID NO:1) with the nucleic acid sequence of Homo sapiens TWIK-related acid-sensitive K+ channel (TASK) mRNA (Accession Number AF006823, SEQ ID NO:7) using a score of 100 and a wordlength of 12. The results show that the nucleotide sequence of human TWIK-6 is 72% identical to Accession Number AF006823 over nucleotides 200-1158 of SEQ ID NO: 1.

[0045] FIG. 5 depicts a BLASTX alignment of the human TWIK-6 predicted amino acid sequence (SEQ ID NO:2) with the amino acid sequence of Homo sapiens TWIK-related acid-sensitive K+ channel (Accession Number AF006823, SEQ ID NO:8) using a score of 100, a BLOSUM 62 matrix, and a wordlength of 3. The results show that the amino acid sequence of human TWIK-6 is 65% identical to that of Accession Number AF006823 over translated nucleotides 313-1086 of SEQ ID NO:2, 40% identical over translated nucleotides 1265 to 1354 of SEQ ID NO:2, and 33% identical over translated nucleotides 1253 to 1369 of SEQ ID NO:2.

[0046] FIG. 6 depicts an alignment of the human TWIK-6 amino acid sequence (SEQ ID NO:2, identified as 17831fl) with the amino acid sequences of TWIK-related acid-sensitive K+ channel from Homo sapiens (Accession Number AF006823, SEQ ID NO:8, identified as 2465542_TWIK_human) and TWIK-related acid-sensitive K+ channel from Rattus norvegicus (Accession Number AF031384, SEQ ID NO:9, identified as 2809391_TWIK_rat) using the CLUSTAL W (1.74) multiple sequence alignment program.

[0047] FIG. 7 depicts the results of a search which was performed against the MEMSAT database and which resulted in the identification of four “transmembrane domains” and two “Pore-loops” in the human TWIK-6 protein (SEQ ID NO:2 or SEQ ID NO:5). The human TWIK-6 amino acid sequence is also shown (SEQ ID NO:2)

[0048] FIG. 8 depicts the results of a search which was performed against the ProDom database and which resulted in the identification of a “potassium channel protein domain” (SEQ ID NOs:10, 11, and 12) and a TWIK-related ion channel domain (SEQ ID NO:13) in the human TWIK-6 protein (SEQ ID NO:2).

[0049] FIGS. 9A-B depict the cDNA sequence and predicted amino acid sequence of human TWIK-7. The nucleotide sequence corresponds to nucleic acids 1 to 1943 of SEQ ID NO:14. The amino acid sequence corresponds to amino acids 1 to 431 of SEQ ID NO:15. The coding region without the 3′ untranslated region of the human TWIK-7 gene is shown in SEQ ID NO:16.

[0050] FIG. 10 depicts a structural, hydrophobicity, and antigenicity analysis of the human TWIK-7 protein.

[0051] FIGS. 11A-11C depict an alignment of the human TWIK-7 nucleic acid sequence (SEQ ID NO:14) with the nucleic acid sequence of Homo sapiens TWIK-related acid sensitive K+ channel (TASK) mRNA (Accession Number AF006823; SEQ ID NO:17), using the GAP program in the GCG software package (nwsgapdna matrix), a gap weight of 50, and a length weight of 3.

[0052] FIGS. 12A-12B depict an alignment of the human TWIK-7 amino acid sequence (SEQ ID NO:15) with the amino acid sequence of Homo sapiens TWIK related acid sensitive K+ channel (Accession Number AAC51777; SEQ ID NO:18), using the GAP program in the GCG software package (Blosum 62 matrix), a gap weight of 12, and a length weight of 4.

[0053] FIG. 13 depicts the results of a search which was performed against the MEMSAT database and which resulted in the identification of four “transmembrane domains” and two “Pore-loop domains” in the human TWIK-7 protein (SEQ ID NO:15).

[0054] FIG. 14 depicts the results of a search which was performed against the ProDom database and which resulted in the identification of a “potassium channel protein domain” (SEQ ID NO:19) in the human TWIK-7 protein (SEQ ID NO:15).

[0055] FIG. 15 depicts an alignment of the human TWIK-7 amino acid sequence (SEQ ID NO:15) with the amino acid sequences of TWIK-1 from Mus musculus (“mTWIK1”; Accession No. AAC16973; SEQ ID NO:20), and of TWIK-related acid-sensitive K+ channel (“hTASK”; Accession No. AF006823; SEQ ID NO:17) from Homo sapiens, using the CLUSTAL W (1.74) multiple sequence alignment program.

[0056] FIGS. 16A-G depict the cDNA sequence and predicted amino acid sequence of human IC23927. The nucleotide sequence corresponds to nucleic acids 1 to 5269 of SEQ ID NO:21. The amino acid sequence corresponds to amino acids 1 to 816 of SEQ ID NO:22. The stop codon is indicted by an asterisk. The coding region without the 3′ untranslated region of the human IC23927 gene is shown in SEQ ID NO:23.

[0057] FIG. 17 depicts a structural, hydrophobicity, and antigenicity analysis of the human IC23927 protein.

[0058] FIGS. 18A-C depict an alignment of the amino acid sequence of human IC23927 (SEQ ID NO:22) with the amino acid sequence of GenBank™ Accession No. BAA76556, corresponding to a Rattus norvegicus voltage-gated Ca channel (SEQ ID NO:24) and GenBank™ Accession No. AAD15312 corresponding to an Arabidopsis thaliana putative calcium channel (SEQ ID NO:25). The initial pairwise alignment step was performed using a Lipman Pearson algorithm with a K-tuple of 1, a GAP penalty of 3, a window of 5, and diagonals saved set to 5. The multiple alignment step was performed using the Clustal algorithm with a PAM 250 residue weight Table, a GAP penalty of 10, and a GAP length penalty of 10.

[0059] FIG. 19 depicts the cDNA sequence and predicted amino acid sequence of human TWIK-8. The nucleotide sequence corresponds to nucleic acids 1 to 1408 of SEQ ID NO:28. The amino acid sequence corresponds to amino acids 1 to 419 of SEQ ID NO:29. The coding region without the 3′ untranslated region of the human TWIK-8 gene is shown in SEQ ID NO:30.

[0060] FIG. 20 depicts the results of an analysis of the human TWIK-8 amino acid sequence (SEQ ID NO:29) by the Signal P program (Henrik et al. (1997) Protein Eng. 10:1-6), indicating the presence of a signal peptide at about residues 1-46 of the native molecule.

[0061] FIG. 21 depicts the results of a search which was performed against the MEMSAT database and which resulted in the identification of six transmembrane domains in the native human TWIK-8 protein (SEQ ID NO:29), and five transmembrane domains in the mature form of the human TWIK-8 protein.

[0062] FIG. 22 depicts the results of a search performed against the HMM database which identified the presence of a “seven-transmembrane receptor domain” and a “cyclic nucleotide-gated channel domain” in the amino acid sequence of human TWIK-8 (SEQ ID NO:29).

[0063] FIGS. 23A-H depict the results of a search performed against the ProDom database which identified the presence of a “TRAAK potassium channel domain”, a “potassium channel protein domain”, a “voltage-gated potassium channel domain”, an “outward-rectifier TOK1 potassium channel domain”, and a “potassium channel subunit domain” in the amino acid sequence of human TWIK-8 (SEQ ID NO:29).

[0064] FIGS. 24A-24C depict the cDNA sequence and predicted amino acid sequence of human IC47611. The nucleotide sequence corresponds to nucleic acids 1 to 4037 of SEQ ID NO:31. The amino acid sequence corresponds to amino acids 1 to 453 of SEQ ID NO:32. The coding region without the 3′ untranslated region of the human IC47611 gene is shown in SEQ ID NO:33.

[0065] FIG. 25 depicts a hydrophobicity plot of the amino acid sequence of human IC47611 (SEQ ID NO:32).

[0066] FIG. 26 depicts the results of a search which was performed against the MEMSAT database and which resulted in the identification of two “transmembrane domains” in the human IC47611 protein (SEQ ID NO:32).

[0067] FIG. 27 depicts the results of a search which was performed against the HMM database and which resulted in the identification of an “inward-rectifier potassium channel (IRK) domain” in the human IC47611 protein (SEQ ID NO:32).

[0068] FIG. 28 depicts the results of a search which was performed against the ProDom database and which resulted in the identification of an “inward-rectifier potassium channel (IRK) domain” and a “inward-rectifier potassium channel (IRK)-related domain” in the human IC47611 protein (SEQ ID NO:32).

[0069] FIGS. 29A-29C depict the cDNA sequence and predicted amino acid sequence of human IC47615. The nucleotide sequence corresponds to nucleic acids 1 to 4003 of SEQ ID NO:34. The amino acid sequence corresponds to amino acids 1 to 305 of SEQ ID NO:35. The coding region without the 3′ untranslated region of the human IC47615 gene is shown in SEQ ID NO:36.

[0070] FIG. 30 depicts a hydrophobicity plot of the amino acid sequence of human IC47615 (SEQ ID NO:35).

[0071] FIG. 31 depicts the results of a search which was performed against the MEMSAT database and which resulted in the identification of one “transmembrane domain” in the human IC47615 protein (SEQ ID NO:35).

[0072] FIG. 32 depicts the cDNA sequence and predicted amino acid sequence of HNMDA-1. The nucleotide sequence corresponds to nucleic acids 1 to 4197 of SEQ ID NO:37. The amino acid sequence corresponds to amino acids 1 to 1115 of SEQ ID NO:38. The coding region without the 3′ untranslated region of the HNMDA-1 gene is shown in SEQ ID NO:39.

[0073] FIG. 33 depicts a structural, hydrophobicity, and antigenicity analysis of the HNMDA-1 polypeptide.

[0074] FIG. 34 depicts the results of a search which was performed against the HMM database in PFAM and which resulted in the identification of one “ligand-gated ion channel family domain” in the HNMDA-1 polypeptide (SEQ ID NO:38).

[0075] FIGS. 35A-B depict the results of a search which was performed against the HMM database in SMART and which resulted in the identification of one “glutamate-gated ion channel family domain” in the HNMDA-1 polypeptide (SEQ ID NO:38).

[0076] FIG. 36 depicts the results of a search which was performed against the MEMSAT database and which resulted in the identification of four “transmembrane domains” and one “signal peptide” in the HNMDA-1 polypeptide (SEQ ID NO:38).

[0077] FIG. 37 depicts an alignment of the HNMDA-1 amino acid sequence (SEQ ID NO:38) with the amino acid sequences of rat NMDA-L (Accession No. 1050330) using the CLUSTAL W (1.74) alignment program.

[0078] FIG. 38 depicts the nucleotide sequence of the human TWIK-9 cDNA and the corresponding amino acid sequence. The nucleotide sequence corresponds to nucleic acids 1 to 1262 of SEQ ID NO:40. The amino acid sequence corresponds to amino acids 1-374 of SEQ ID NO:41. The coding region without the 5′ or 3′ untranslated regions of the human TWIK-9 gene is shown in SEQ ID NO:42.

[0079] FIG. 39 depicts a structural, hydrophobicity, and antigenicity analysis of the human TWIK-9 protein.

[0080] FIGS. 40A-40B depicts the results of a search which was performed against the Washington University HMM database and which resulted in the identification of the protein of SEQ ID NO:41 as a TWIK channel family member.

[0081] FIGS. 41A-D depict the cDNA sequence and predicted amino acid sequence of human α₂δ-4. The nucleotide sequence corresponds to nucleic acids 1 to 5489 of SEQ ID NO:43. The amino acid sequence corresponds to amino acids 1 to 116 of SEQ ID NO:44. The coding region without the 5′ and 3′ untranslated regions of the human α₂δ-4 gene is shown in SEQ ID NO:45.

[0082] FIG. 42 depicts a structural, hydrophobicity, and antigenicity analysis of the human α₂δ-4 polypeptide (SEQ ID NO:44).

[0083] FIGS. 43A-43B depicts an alignment of the human α₂δ-4 amino acid sequence (SEQ ID NO:44) with the amino acid sequence of the human dihydropyridine-sensitive L-type calcium channel α₂δ subunit protein CIC2 (SwissProt Accession No. P54289), using the CLUSTAL W (1.74) alignment program.

[0084] FIGS. 44A-44D depict the cDNA sequence and predicted amino acid sequence of human 8099. The nucleotide sequence corresponds to nucleic acids 1 to 2725 of SEQ ID NO:46. The amino acid sequence corresponds to amino acids 1 to 617 of SEQ ID NO:47. The coding region without the 5′ and 3′ untranslated regions of the human 8099 gene is shown in SEQ ID NO:48.

[0085] FIG. 45 depicts a structural, hydrophobicity, and antigenicity analysis of the human 8099 polypeptide (SEQ ID NO:47).

[0086] FIGS. 46A-46G depict the results of a search which was performed against the HMM database in PFAM.

[0087] FIGS. 47A-B depicts an alignment of the human 8099 amino acid sequence (SEQ ID NO:47) with the amino acid sequence of the E. coli galactose-proton symporter GALP using the CLUSTAL W (1.74) alignment program (having GenBank Accession No. P37021, set forth as SEQ ID NO:73).

[0088] FIGS. 48A-B depict an alignment of the human 8099 amino acid sequence (SEQ ID NO:47) with the amino acid sequence of the E. coli arabinose-proton symporter ARAE using the CLUSTAL W (1.74) alignment program (having GenBank Accession No. P09830, set forth as SEQ ID NO:74).

[0089] FIGS. 49A-C depict an alignment of the human 8099 amino acid sequence (SEQ ID NO:47) with the amino acid sequence of E. coli GALP and ARAE using the CLUSTAL W (1.74) alignment program (having GenBank Accession Nos. P37021 and P09830, respectively, set forth as SEQ ID NOs:73 and 74, respectively).

[0090] FIGS. 50A-B depict an alignment of the human 8099 amino acid sequence (SEQ ID NO:47) with the amino acid sequence of the H. sapiens facilitative glucose transporter GLUT8 using the CLUSTAL W (1.74) alignment program (having GenBank Accession No. Y02168, set forth as SEQ ID NO:75).

[0091] FIGS. 51A-51D depict the cDNA sequence and predicted amino acid sequence of human 46455. The nucleotide sequence corresponds to nucleic acids 1 to 2230 of SEQ ID NO:49. The amino acid sequence corresponds to amino acids 1 to 528 of SEQ ID NO:50. The coding region without the 5′ and 3′ untranslated regions of the human 46455 gene is shown in SEQ ID NO:51.

[0092] FIG. 52 depicts a structural, hydrophobicity, and antigenicity analysis of the human 46455 polypeptide (SEQ ID NO:50).

[0093] FIGS. 53A-53G depict the results of a search which was performed against the HMM database in PFAM.

[0094] FIGS. 54A-B depict an alignment of the human 46455 amino acid sequence (SEQ ID NO:50) with the amino acid sequence of C. elegans Z92825 using the CLUSTAL W (1.74) alignment program (having GenBank Accession No. Z92825, set forth as SEQ ID NO:76).

[0095] FIGS. 55A-55H depict the nucleotide sequence of the human 54414 cDNA and the corresponding amino acid sequence. The nucleotide sequence corresponds to nucleic acids 1 to 4632 of SEQ ID NO:52. The amino acid sequence corresponds to amino acids 1 to 1118 of SEQ ID NO:53. The coding region without the 5′ or 3′ untranslated regions of the human 54414 gene is shown in SEQ ID NO:54.

[0096] FIG. 56 depicts a structural, hydrophobicity, and antigenicity analysis of the human 54414 polypeptide (SEQ ID NO:53). The locations of the 6 transmembrane domains, as well as the pore domain (P), are indicated.

[0097] FIG. 57B depict the results of a search in the HMM database, using the amino acid sequence of human 54414.

[0098] FIGS. 58A-58D depict a Clustal W (1.74) multiple sequence alignment of the human 54414 amino acid sequence (54414.prot; SEQ ID NO:53) and the amino acid sequence of the Rattus norvegicus Slack potassium channel subunit (AF089730; SEQ ID NO:77; GenBank Accession No. AAC83350). Amino acid identities are indicated by stars. The six transmembrane domains (TM1, TM2, etc.) are boxed. The pore domain, which contains the potassium channel signature sequence motif, is also boxed.

[0099] FIGS. 59A-59D depict the nucleotide sequence of the human 53763 cDNA and the corresponding amino acid sequence. The nucleotide sequence corresponds to nucleic acids 1 to 2847 of SEQ ID NO:55. The amino acid sequence corresponds to amino acids 1 to 638 of SEQ ID NO:56. The coding region without the 5′ or 3′ untranslated regions of the human 53763 gene is shown in SEQ ID NO:57.

[0100] FIG. 60 depicts a structural, hydrophobicity, and antigenicity analysis of the human 53763 polypeptide (SEQ ID NO:56). The locations of the 6 transmembrane domains, as well as the pore domain (P), are indicated.

[0101] FIGS. 61A-61E depict the results of a search in the HMM database, using the amino acid sequence of human 53763.

[0102] FIGS. 62A-B depict a Clustal W (1.74) sequence alignment of the human 53763 amino acid sequence (Fbh53763pat; SEQ ID NO:56) and the amino acid sequence of the Rattus norvegicus voltage-gated potassium channel protein KV3.2 (KSHIIIA) (ratCIKE; SEQ ID NO:78; GenBank Accession No. P22462). Amino acid identities are indicated by stars. The six transmembrane domains (TM1, TM2, etc.) are boxed. The pore domain, which contains the potassium channel signature sequence motif, is also boxed. Plus signs (+) at every third position of the fourth transmembrane domain (TM4), indicate the positively charged residues of the voltage sensor.

[0103] FIGS. 63A-63H depict the cDNA sequence and predicted amino acid sequence of human 67076. The nucleotide sequence corresponds to nucleic acids 1 to 6582 of SEQ ID NO:58. The amino acid sequence corresponds to amino acids 1 to 1129 of SEQ ID NO:59. The coding region without the 5′ and 3′ untranslated regions of the human 67076 gene is shown in SEQ ID NO:60.

[0104] FIG. 64 depicts a structural, hydrophobicity, and antigenicity analysis of the human 67076 polypeptide (SEQ ID NO:59).

[0105] FIGS. 65A-C depict the results of a search in the HMM database, using the amino acid sequence of human 67076.

[0106] FIGS. 66A-D depict a Clustal W (1.74) alignment of the human 67076 amino acid sequence (“Fbh67076FL”; SEQ ID NO:59) with the amino acid sequence of mouse Potential Phospholipid-Transporting ATPase IH (mouseAT1H) (GenBank Accession No. P98197) (SEQ ID NO:79). The transmembrane domains (“TM1”, “TM2”, etc.), E1-E2 ATPases phosphorylation site (“phosphorylation site”), and phospholipid transporter specific amino acid residues (“phospholipid transport”) are boxed.

[0107] FIGS. 67A-67I depict the cDNA sequence and predicted amino acid sequence of human 67102. The nucleotide sequence corresponds to nucleic acids 1 to 6074 of SEQ ID NO:61. The amino acid sequence corresponds to amino acids 1 to 1426 of SEQ ID NO:62. The coding region without the 5′ and 3′ untranslated regions of the human 67102 gene is shown in SEQ ID NO:63.

[0108] FIG. 68 depicts a structural, hydrophobicity, and antigenicity analysis of the human 67102 polypeptide (SEQ ID NO:62).

[0109] FIGS. 69A-69E depict the results of a search in the HMM database, using the amino acid sequence of human 67102.

[0110] FIGS. 70A-70E depict a Clustal W (1.74) alignment of the human 67102 amino acid sequence (“Fbh67102FL”; SEQ ID NO:62) with the amino acid sequence of mouse Potential Phospholipid-Transporting ATPase VA (mouseAT5A) (GenBank Accession No. O54827) (SEQ ID NO:80). The transmembrane domains (“TM1”, “TM2”, etc.), E1-E2 ATPases phosphorylation site (“phosphorylation site”), and phospholipid transporter specific amino acid residues (“phospholipid transport”) are boxed.

[0111] FIGS. 71A-71J depict the cDNA sequence and predicted amino acid sequence of human 44181. The nucleotide sequence corresponds to nucleic acids 1 to 7221 of SEQ ID NO:64. The amino acid sequence corresponds to amino acids 1 to 1177 of SEQ ID NO:65. The coding region without the 5′ and 3′ untranslated regions of the human 44181 gene is shown in SEQ ID NO:66.

[0112] FIG. 72 depicts a structural, hydrophobicity, and antigenicity analysis of the human 44181 polypeptide (SEQ ID NO:65).

[0113] FIGS. 73A-73D depict the results of a search in the HMM database, using the amino acid sequence of human 44181.

[0114] FIGS. 74A-74E depict a Clustal W (1.74) multiple sequence alignment of the human 44181 amino acid sequence (“Fbh44181”; SEQ ID NO:65) with the amino acid sequence of mouse Potential Phospholipid-Transporting ATPase IH (mouseAT1H) (GenBank Accession No. P98197) (SEQ ID NO:79) and 67076 (“Fbh67076FL”; SEQ ID NO:59). The transmembrane domains (“TM1”, “TM2”, etc.), E1-E2 ATPases phosphorylation site (“phosphorylation site”), and phospholipid transporter specific amino acid residues (“phospholipid transport”) are boxed.

[0115] FIGS. 75A-75G depict the cDNA sequence and predicted amino acid sequence of human 67084FL. The nucleotide sequence corresponds to nucleic acids 1 to 4198 of SEQ ID NO:67. The amino acid sequence corresponds to amino acids 1 to 1084 of SEQ ID NO:68. The coding region without the 5′ and 3′ untranslated regions of the human 67084FL gene is shown in SEQ ID NO:69.

[0116] FIG. 76 depicts a structural, hydrophobicity, and antigenicity analysis of the human 67084FL polypeptide (SEQ ID NO:68).

[0117] FIGS. 77A-77C depict the results of a search in the HMM database, using the amino acid sequence of human 67084FL.

[0118] FIGS. 78A-78C depict a Clustal W (1.74) alignment of the human 67084FL amino acid sequence (“Fbh67084FL”; SEQ ID NO:68) with the amino acid sequence of mouse Potential Phospholipid-Transporting ATPase IIV (mouseAT2B) (GenBank Accession No.:P98195) (SEQ ID NO:81). The transmembrane domains (“TM1”, “TM2”, etc.), E1-E2 ATPases phosphorylation site (“phosphorylation site”), and phospholipid transporter specific amino acid residues (“phospholipid transport”) are boxed.

[0119] FIGS. 79A-79G depict the cDNA sequence and predicted amino acid sequence of human 67084alt. The nucleotide sequence corresponds to nucleic acids 1 to 4231 of SEQ ID NO:70. The amino acid sequence corresponds to amino acids 1 to 1095 of SEQ ID NO:71. The coding region without the 5′ and 3′ untranslated regions of the human 67084alt gene is shown in SEQ ID NO:72.

[0120] FIG. 80 depicts a structural, hydrophobicity, and antigenicity analysis of the human 67084alt polypeptide (SEQ ID NO:71).

[0121] FIGS. 81A-81C depict the results of a search in the HMM database, using the amino acid sequence of human 67084.

[0122] FIGS. 82A-82C depict a Clustal W (1.74) alignment of the human 67084alt amino acid sequence (“Fbh67084alt”; SEQ ID NO:71) with the amino acid sequence of mouse Potential Phospholipid-Transporting ATPase IIV (mouseAT2B) (GenBank Accession No.:P98195) (SEQ ID NO:81). The transmembrane domains (“TM1”, “TM2”, etc.), E1-E2 ATPases phosphorylation site (“phosphorylation site”), and phospholipid transporter specific amino acid residues (“phospholipid transport”) are boxed.

### DETAILED DESCRIPTION OF THE INVENTION

[0123] The present invention is based, at least in part, on the discovery of novel molecules, referred to herein as TWIK-6 nucleic acid and protein molecules, which are novel members of the TWIK (for Tandem of P domains in a Weak Inward rectifying K⁺ channel) family of potassium channels. These novel molecules are capable of, for example, modulating a potassium channel mediated activity in a cell, e.g., a neuronal cell, a muscle cell (e.g., a cardiac muscle), or a thymus cell.

[0124] As used herein, a “potassium channel” includes a protein or polypeptide which is involved in receiving, conducting, and transmitting signals in an electrically excitable cell, e.g., a neuronal cell or a muscle cell. Potassium channels are potassium ion selective, and can determine membrane excitability (the ability of, for example, a neuron to respond to a stimulus and convert it into an impulse). Potassium channels can also influence the resting potential of membranes, wave forms and frequencies of action potentials, and thresholds of excitation. Potassium channels are typically expressed in electrically excitable cells, e.g., neurons, muscle, endocrine, and egg cells, and may form heteromultimeric structures, e.g., composed of pore-forming α and cytoplasmic β subunits. Potassium channels may also be found in nonexcitable cells (e.g., thymus cells), where they may play a role in, e.g., signal transduction. Examples of potassium channels include: (1) the voltage-gated potassium channels, (2) the ligand-gated potassium channels, e.g., neurotransmitter-gated potassium channels, and (3) cyclic-nucleotide-gated potassium channels. Voltage-gated and ligand-gated potassium channels are expressed in the brain, e.g., in brainstem monoaminergic and forebrain cholinergic neurons, where they are involved in the release of neurotransmitters, or in the dendrites of hippocampal and neocortical pyramidal cells, where they are involved in the processes of learning and memory formation. For a detailed description of potassium channels, see Kandel E. R.. et al., Principles of Neural Science, second edition, (Elsevier Science Publishing Co., Inc., N.Y. (1985)), the contents of which are incorporated herein by reference. As the TWIK proteins of the present invention may modulate potassium channel mediated activities, they may be useful for developing novel diagnostic and therapeutic agents for potassium channel associated disorders.

[0125] As used herein, a “potassium channel associated disorder” includes a disorder, disease or condition which is characterized by a misregulation of a potassium channel mediated activity. Potassium channel associated disorders can detrimentally affect conveyance of sensory impulses from the periphery to the brain and/or conductance of motor impulses from the brain to the periphery; integration of reflexes; interpretation of sensory impulses; cellular proliferation, growth, differentiation, or migration, and emotional, intellectual (e.g., learning and memory), or motor processes. Examples of potassium channel associated disorders include CNS disorders such as cognitive and neurodegenerative disorders, examples of which include, but are not limited to, Alzheimer's disease, dementias related to Alzheimer's disease (such as Pick's disease), Parkinson's and other Lewy diffuse body diseases, senile dementia, Huntington's disease, Gilles de la Tourette's syndrome, multiple sclerosis, amyotrophic lateral sclerosis, progressive supranuclear palsy, epilepsy, and Jakob-Creutzfieldt disease; autonomic function disorders such as hypertension and sleep disorders, and neuropsychiatric disorders, such as depression, schizophrenia, schizoaffective disorder, korsakoff's psychosis, mania, anxiety disorders, or phobic disorders; learning or memory disorders, e.g., amnesia or age-related memory loss, attention deficit disorder, dysthymic disorder, major depressive disorder, mania, obsessive-compulsive disorder, psychoactive substance use disorders, anxiety, phobias, panic disorder, as well as bipolar affective disorder, e.g., severe bipolar affective (mood) disorder (BP-1), and bipolar affective neurological disorders, e.g., migraine and obesity. Further CNS-related disorders include, for example, those listed in the American Psychiatric Association's Diagnostic and Statistical manual of Mental Disorders (DSM), the most current version of which is incorporated herein by reference in its entirety.

[0126] Further examples of potassium channel associated disorders include cardiac-related disorders. Cardiovascular system disorders in which the TWIK-6 molecules of the invention may be directly or indirectly involved include arteriosclerosis, ischemia reperfusion injury, restenosis, arterial inflammation, vascular wall remodeling, ventricular remodeling, rapid ventricular pacing, coronary microembolism, tachycardia, bradycardia, pressure overload, aortic bending, coronary artery ligation, vascular heart disease, atrial fibrilation, Jervell syndrome, Lange-Nielsen syndrome, long-QT syndrome, congestive heart failure, sinus node dysfunction, angina, heart failure, hypertension, atrial fibrillation, atrial flutter, dilated cardiomyopathy, idiopathic cardiomyopathy, myocardial infarction, coronary artery disease, coronary artery spasm, and arrhythmia. TWIK-6-mediated or related disorders also include disorders of the musculoskeletal system such as paralysis and muscle weakness, e.g., ataxia, myotonia, and myokymia.

[0127] Potassium channel disorders also include cellular proliferation, growth, differentiation, or migration disorders. Cellular proliferation, growth, differentiation, or migration disorders include those disorders that affect cell proliferation, growth, differentiation, or migration processes. As used herein, a “cellular proliferation, growth, differentiation, or migration process” is a process by which a cell increases in number, size or content, by which a cell develops a specialized set of characteristics which differ from that of other cells, or by which a cell moves closer to or further from a particular location or stimulus. The TWIK-6 molecules of the present invention are involved in signal transduction mechanisms, which are known to be involved in cellular growth, differentiation, and migration processes. Thus, the TWIK-6 molecules may modulate cellular growth, differentiation, or migration, and may play a role in disorders characterized by aberrantly regulated growth, differentiation, or migration. Such disorders include cancer, e.g., carcinoma, sarcoma, or leukemia; tumor angiogenesis and metastasis; skeletal dysplasia; neuronal deficiencies resulting from impaired neural induction and patterning; neurodegenerative disorders, e.g., Alzheimer's disease, dementias related to Alzheimer's disease (such as Pick's disease), Parkinson's and other Lewy diffuse body diseases, multiple sclerosis, amyotrophic lateral sclerosis, progressive supranuclear palsy, epilepsy, Jakob-Creutzfieldt disease, or AIDS related dementia; hepatic disorders; cardiovascular disorders; and hematopoietic and/or myeloproliferative disorders.

[0128] TWIK-6-associated or related disorders also include disorders of tissues in which TWIK-6 protein is expressed, e.g., thymus, salivary gland, primary cultured osteoblasts, and ovarian epithelium tumor cells. Such disorders include, for example, proliferative disorders. As used herein, a “potassium channel mediated activity” includes an activity which involves a potassium channel, e.g., a potassium channel in a neuronal cell, a muscle cell, or a thymus cell associated with receiving, conducting, and transmitting signals in, for example, the nervous system. Potassium channel mediated activities include release of neurotransmitters, e.g., dopamine or norepinephrine, from cells, e.g., neuronal cells; modulation of resting potential of membranes, wave forms and frequencies of action potentials, and thresholds of excitation; participation in signal transduction pathways, and modulation of processes such as integration of sub-threshold synaptic responses and the conductance of back-propagating action potentials in, for example, neuronal cells or muscle cells.

[0129] The term “family” when referring to the protein and nucleic acid molecules of the invention is intended to mean two or more proteins or nucleic acid molecules having a common structural domain or motif and having sufficient amino acid or nucleotide sequence homology as defined herein. Such family members can be naturally or non-naturally occurring and can be from either the same or different species. For example, a family can contain a first protein of human origin, as well as other, distinct proteins of human origin or alternatively, can contain homologues of non-human origin, e.g., monkey proteins. Members of a family may also have common functional characteristics.

[0130] For example, the family of TWIK-6 proteins comprises at least one “transmembrane domain” and preferably four transmembrane domains. As used herein, the term “transmembrane domain” includes an amino acid sequence of about 15 amino acid residues in length which spans the plasma membrane. More preferably, a transmembrane domain includes about at least 20, 25, 30, 35, 40, or 45 amino acid residues and spans the plasma membrane. Transmembrane domains are rich in hydrophobic residues, and typically have an alpha-helical structure. In a preferred embodiment, at least 50%, 60%, 70%, 80%, 90%, 95% or more of the amino acids of a transmembrane domain are hydrophobic, e.g., leucines, isoleucines, tyrosines, or tryptophans. Transmembrane domains are described in, for example, Zagotta W. N. et al., (1996) Annual Rev. Neurosci. 19: 235-263, the contents of which are incorporated herein by reference. Amino acid residues 78-96, 178-195, 229-248, and 290-314 of the native TWIK-6 protein are predicted to comprise transmembrane domains (see FIG. 7). Accordingly, TWIK-6 proteins having at least 50-60% homology, preferably about 60-70%, more preferably about 70-80%, or about 80-90% homology with a transmembrane domain of human TWIK-6 are within the scope of the invention.

[0131] In another embodiment, a TWIK-6 molecule of the present invention is identified based on the presence of a Pore loop or P-loop. As used herein, the term “Pore loop” or “P-loop” includes amino acid sequence of about 15-45 amino acid residues in length, preferably about 15-35 amino acid residues in length, and most preferably about 15-25 amino acid residues in length, which is hydrophobic and which is involved in lining the potassium channel pore. A P-loop is typically found between transmembrane domains of potassium channels and is believed to be a major determinant of ion selectivity in potassium channels. Preferably, P-loops contain a G-[HYDROPHOBIC AMINO ACID]-G sequence, e.g., a GYG, GLG, or GFG sequence. P-loops are described in, for example, Wamike et al. (1991) Science 252:1560-1562; Zagotta W. N. et al., (1996) Annual Rev. Neurosci. 19:235-63 (Pongs, O. (1993) J. Membr. Biol., 136, 1-8; Heginbotham et al. (1994) Biophys. J. 66,1061-1067; Mackinnon, R. (1995) Neuron, and 14, 889-892; Pascual et al., (1995) Neuron., 14, 1055-1063), the contents of which are incorporated herein by reference. Amino acid residues 150-166 and 260-278 of SEQ ID NO:2 comprise P-loop domains, as do amino acid residues 150-166 and 260-278 of SEQ ID NO:5. The human TWIK-6 gene contains a nucleotide polymorphism at nucleotide 596 (A to G) which results in an amino acid alteration at amino acid position 165 (E to G). The 165E form of the protein is set forth in SEQ ID NO:2, and lacks the “GYG” P-loop motif which the 165G form of the protein (SEQ ID NO:5) possesses at residues 165-167. Thus, the 165E form of the human TWIK-6 protein (SEQ ID NO:2) has only one “G-[hydrophobic]-G” motif in its two P-loop domains, while the 165G form of the human TWIK-6 protein (SEQ ID NO:5) has two “G-[hydrophobic]-G” motifs in its two P-loop domains.

[0132] In another embodiment, a TWIK-6 molecule of the present invention is identified based on the presence of a “potassium channel protein domain” in the protein or corresponding nucleic acid molecule. As used herein, the term “potassium channel protein domain” includes a protein domain having an amino acid sequence of about 150-250 amino acid residues and having a bit score for the alignment of the sequence to the TWIK-related ion channel domain of at least 162. Preferably, a TWIK-related ion channel domain includes at least about 200-240, or more preferably about 232 amino acid residues, and has a bit score for the alignment of the sequence to the TWIK-related ion channel domain of at least 20, 25, 30, 35, 40, 45, 50, 55, 60, 65, 70, 75, 80, 85, 90, 95, 100, 105, 110, 115, 120, 125, 130, 135, 140, 145, 150, 155, 160 or higher. The potassium channel protein domain has been assigned ProDom entry 1641. To identify the presence of a potassium channel protein domain in a TWIK-6 protein, and make the determination that a protein of interest has a particular profile, the amino acid sequence of the protein is searched against a database of known protein domains (e.g., the ProDom database) using the default parameters (available at http://www.toulouse.inra.fr/prodom.html). A search was performed against the ProDom database resulting in the identification of a potassium channel protein domain in the amino acid sequence of human TWIK-6 (SEQ ID NO:2 or 5) at about residues 81-312 of SEQ ID NO: 2 or 5. The results of the search are set forth in FIG. 8.

[0133] In another embodiment, a TWIK-6 molecule of the present invention is identified based on the presence of a “TWIK-related ion channel domain” in the protein or corresponding nucleic acid molecule. As used herein, the term “TWIK-related ion channel domain” includes a protein domain having an amino acid sequence of about 25-125 amino acid residues and having a bit score for the alignment of the sequence to the TWIK-related ion channel domain of at least 149. Preferably, a TWIK-related ion channel domain includes at least about 50-100, or more preferably about 70 amino acid residues, and has a bit score for the alignment of the sequence to the TWIK-related ion channel domain of at least 20, 25, 30, 35, 40, 45, 50, 55, 60, 65, 70, 75, 80, 85, 90, 95, 100, 105, 110, 115, 120, 125, 130, 135, 140, 145 or higher. The TWIK-related ion channel domain has been assigned ProDom entry 11540. To identify the presence of a TWIK-related ion channel domain in a TWIK-6 protein, and make the determination that a protein of interest has a particular profile, the amino acid sequence of the protein is searched against a database of known protein domains (e.g., the ProDom database) using the default parameters (available at http://www.toulouse.inra.fr/prodom.html). A search was performed against the ProDom database resulting in the identification of a TWIK-related ion channel domain in the amino acid sequence of human TWIK-6 (SEQ ID NO: 2 or 5) at about residues 75-144 of SEQ ID NO: 2 or SEQ ID NO:5. The results of the search are set forth in FIG. 8.

[0134] In a preferred embodiment, the TWIK-6 molecules of the invention include at least one transmembrane domain, at least one P-loop, at least one TWIK-related ion channel domain, and at least one potassium channel protein domain.

[0135] Isolated proteins of the present invention, preferably TWIK-6 proteins, have an amino acid sequence sufficiently identical to the amino acid sequence of SEQ ID NO:2 or 5 or are encoded by a nucleotide sequence sufficiently identical to SEQ ID NO:1 or 3 or SEQ ID NO:4 or 6. As used herein, the term “sufficiently identical” refers to a first amino acid or nucleotide sequence which contains a sufficient or minimum number of identical or equivalent (e.g., an amino acid residue which has a similar side chain) amino acid residues or nucleotides to a second amino acid or nucleotide sequence such that the first and second amino acid or nucleotide sequences share common structural domains or motifs and/or a common functional activity. For example, amino acid or nucleotide sequences which share common structural domains have at least 30%, 40%, or 50% homology, preferably 60% homology, more preferably 70%-80%, and even more preferably 90-95% homology across the amino acid sequences of the domains and contain at least one and preferably two structural domains or motifs, are defined herein as sufficiently identical. Furthermore, amino acid or nucleotide sequences which share at least 30%, 40%, or 50%, preferably 60%, more preferably 70-80%, or 90-95% homology and share a common functional activity are defined herein as sufficiently identical.

[0136] As used interchangeably herein, an “TWIK-6 activity”, “biological activity of TWIK-6” or “functional activity of TWIK-6”, refers to an activity exerted by a TWIK-6 protein, polypeptide or nucleic acid molecule on a TWIK-6 responsive cell or tissue, or on a TWIK-6 protein substrate, as determined in vivo, or in vitro, according to standard techniques. In one embodiment, a TWIK-6 activity is a direct activity, such as an association with a TWIK-6-target molecule. As used herein, a “target molecule” or “binding partner” is a molecule with which a TWIK-6 protein binds or interacts in nature, such that TWIK-6-mediated function is achieved. A TWIK-6 target molecule can be a non-TWIK-6 molecule or a TWIK-6 protein or polypeptide of the present invention. In an exemplary embodiment, a TWIK-6 target molecule is a TWIK-6 ligand, e.g., a potassium channel pore-forming subunit or a potassium channel ligand. Alternatively, a TWIK-6 activity is an indirect activity, such as a cellular signaling activity mediated by interaction of the TWIK-6 protein with a TWIK-6 ligand. The biological activities of TWIK-6 are described herein. For example, the TWIK-6 proteins of the present invention can have one or more of the following activities: (1) interacting with a non-TWIK protein molecule; (2) activating a TWIK-dependent signal transduction pathway; (3) modulating the release of neurotransmitters; (4) modulating membrane excitability; (5) influencing the resting potential of membranes, wave forms and frequencies of action potentials, and thresholds of excitation, and (6) modulating processes which underlie learning and memory, such as integration of sub-threshold synaptic responses and the conductance of back-propagating action potentials.

[0137] Accordingly, another embodiment of the invention features isolated TWIK-6 proteins and polypeptides having a TWIK-6 activity. Preferred proteins are TWIK-6 proteins having at least one transmembrane domain, and, preferably, a TWIK-6 activity. Other preferred proteins are TWIK-6 proteins having a TWIK-related ion channel domain and, preferably, a TWIK-6 activity. Other preferred proteins are TWIK-6 proteins having a P-loop domain and, preferably, a TWIK-6 activity. Other preferred proteins are TWIK-6 proteins having a potassium channel protein domain and, preferably, a TWIK-6 activity. Yet other preferred proteins are TWIK-6 proteins having at least one transmembrane domain, a TWIK-related ion channel domain, a P-loop domain, and a potassium channel protein domain and, preferably, a TWIK-6 activity.

[0138] Additional preferred proteins have at least one transmembrane domain, and one or more of a TWIK-related ion channel domain, a P-loop domain, and/or a potassium channel protein domain, and are, preferably, encoded by a nucleic acid molecule having a nucleotide sequence which hybridizes under stringent hybridization conditions to a nucleic acid molecule comprising the nucleotide sequence of SEQ ID NO:1 or 3 or SEQ ID NO:4 or 6.

[0139] The nucleotide sequence of the isolated human TWIK-6 cDNA and the predicted amino acid sequence of the human TWIK-6 polypeptide are shown in FIGS. 1A-1B and in SEQ ID NOs:1 and 2, respectively. The nucleotide sequences of the human TWIK-6 containing an A to G polymorphism at nucleotide 596 and the predicted amino acid sequence of the human TWIK-6 polypeptide containing an E to G substitution at amino acid position 165 are shown in FIGS. 2A-2B and in SEQ ID NOs:4 and 6, respectively. A plasmid containing the nucleotide sequence encoding human TWIK-6 was deposited with the American Type Culture Collection (ATCC), 10801 University Boulevard, Manassas, Va. 20110-2209, on ______ and assigned Accession Number ______. This deposit will be maintained under the terms of the Budapest Treaty on the International Recognition of the Deposit of Microorganisms for the Purposes of Patent Procedure. This deposit was made merely as a convenience for those of skill in the art and is not an admission that a deposit is required under 35 U.S.C. §112.

[0140] The human TWIK-6 gene, which is approximately 1528 nucleotides in length, encodes a protein having a molecular weight of approximately 45.3 kD and which is approximately 400 amino acid residues in length.

[0141] Various aspects of the invention are described in further detail in the following subsections:

[0142] I. Isolated Nucleic Acid Molecules

[0143] One aspect of the invention pertains to isolated nucleic acid molecules that encode TWIK-6 proteins or biologically active portions thereof, as well as nucleic acid fragments sufficient for use as hybridization probes to identify TWIK-6-encoding nucleic acid molecules (e.g., TWIK-6 mRNA) and fragments for use as PCR primers for the amplification or mutation of TWIK-6 nucleic acid molecules. As used herein, the term “nucleic acid molecule” is intended to include DNA molecules (e.g., cDNA or genomic DNA) and RNA molecules (e.g, mRNA) and analogs of the DNA or RNA generated using nucleotide analogs. The nucleic acid molecule can be single-stranded or double-stranded, but preferably is double-stranded DNA.

[0144] The term “isolated nucleic acid molecule” includes nucleic acid molecules which are separated from other nucleic acid molecules which are present in the natural source of the nucleic acid. For example, with regards to genomic DNA, the term “isolated” includes nucleic acid molecules which are separated from the chromosome with which the genomic DNA is naturally associated. Preferably, an “isolated” nucleic acid is free of sequences which naturally flank the nucleic acid (i.e., sequences located at the 5′ and 3′ ends of the nucleic acid) in the genomic DNA of the organism from which the nucleic acid is derived. For example, in various embodiments, the isolated TWIK-6 nucleic acid molecule can contain less than about 5 kb, 4 kb, 3 kb, 2 kb, 1 kb, 0.5 kb or 0.1 kb of nucleotide sequences which naturally flank the nucleic acid molecule in genomic DNA of the cell from which the nucleic acid is derived. Moreover, an “isolated” nucleic acid molecule, such as a cDNA molecule, can be substantially free of other cellular material, or culture medium when produced by recombinant techniques, or substantially free of chemical precursors or other chemicals when chemically synthesized.

[0145] A nucleic acid molecule of the present invention, e.g., a nucleic acid molecule having the nucleotide sequence of SEQ ID NO:1 or 3, or SEQ ID NO:4 or 6, or the nucleotide sequence of the DNA insert of the plasmid deposited with ATCC as Accession Number ______, or a portion thereof, can be isolated using standard molecular biology techniques and the sequence information provided herein. Using all or portion of the nucleic acid sequence of SEQ ID NO:1 or 3, or SEQ ID NO:4 or 6, or the nucleotide sequence of the DNA insert of the plasmid deposited with ATCC as Accession Number ______, as a hybridization probe, TWIK-6 nucleic acid molecules can be isolated using standard hybridization and cloning techniques (e.g., as described in Sambrook, J., Fritsh, E. F., and Maniatis, T. Molecular Cloning: A Laboratory Manual. 2nd, ed., Cold Spring Harbor Laboratory, Cold Spring Harbor Laboratory Press, Cold Spring Harbor, N.Y., 1989).

[0146] Moreover, a nucleic acid molecule encompassing all or a portion of SEQ ID NO:1 or 3, or SEQ ID NO:4 or 6, or the nucleotide sequence of the DNA insert of the plasmid deposited with ATCC as Accession Number ______ can be isolated by the polymerase chain reaction (PCR) using synthetic oligonucleotide primers designed based upon the sequence of SEQ ID NO:1 or 3, or SEQ ID NO:4 or 6, or the nucleotide sequence of the DNA insert of the plasmid deposited with ATCC as Accession Number ______.

[0147] A nucleic acid of the invention can be amplified using cDNA, mRNA or alternatively, genomic DNA, as a template and appropriate oligonucleotide primers according to standard PCR amplification techniques. The nucleic acid so amplified can be cloned into an appropriate vector and characterized by DNA sequence analysis. Furthermore, oligonucleotides corresponding to TWIK-6 nucleotide sequences can be prepared by standard synthetic techniques, e.g., using an automated DNA synthesizer.

[0148] In a preferred embodiment, an isolated nucleic acid molecule of the invention comprises the nucleotide sequence shown in SEQ ID NO:1 or 4. The sequences of SEQ ID NO:1 and SEQ ID NO:4 correspond to alternate polymorphic forms of the human TWIK-6 cDNA. This cDNA comprises sequences encoding the human TWIK-6 protein (i.e., “the coding region”, from nucleotides 103-1305), as well as 5′ untranslated sequences (nucleotides 1-102) and 3′ untranslated sequences (nucleotides 1306-1528). Alternatively, the nucleic acid molecule can comprise only the coding region of SEQ ID NO:1 or 4 (e.g., nucleotides 103-1305, corresponding to SEQ ID NO:3 or 6, respectively).

[0149] In another preferred embodiment, an isolated nucleic acid molecule of the invention comprises a nucleic acid molecule which is a complement of the nucleotide sequence shown in SEQ ID NO:1 or 3, or SEQ ID NO:4 or 6, or the nucleotide sequence of the DNA insert of the plasmid deposited with ATCC as Accession Number ______, or a portion of any of these nucleotide sequences. A nucleic acid molecule which is complementary to the nucleotide sequence shown in SEQ ID NO:1 or 3, or SEQ ID NO:4 or 6, or the nucleotide sequence of the DNA insert of the plasmid deposited with ATCC as Accession Number ______, is one which is sufficiently complementary to the nucleotide sequence shown in SEQ ID NO:1 or 3, or SEQ ID NO:4 or 6, or the nucleotide sequence of the DNA insert of the plasmid deposited with ATCC as Accession Number ______, such that it can hybridize to the nucleotide sequence shown in SEQ ID NO:1 or 3, or SEQ ID NO:4 or 6, or the nucleotide sequence of the DNA insert of the plasmid deposited with ATCC as Accession Number ______, thereby forming a stable duplex.

[0150] In still another preferred embodiment, an isolated nucleic acid molecule of the present invention comprises a nucleotide sequence which is at least about 50%, 55%, 60%, 65%, 70%, 73%, 74%, 75%, 80%, 85%, 90%, 95%, 96%, 97%, 98%, 99% or more identical to the entire length of the nucleotide sequence shown in SEQ ID NO:1 or 3, or SEQ ID NO:4 or 6, or the entire length of the nucleotide sequence of the DNA insert of the plasmid deposited with ATCC as Accession Number ______, or a portion of any of these nucleotide sequences.

[0151] Moreover, the nucleic acid molecule of the invention can comprise only a portion of the nucleic acid sequence of SEQ ID NO:1 or 3, or SEQ ID NO:4 or 6, or the nucleotide sequence of the DNA insert of the plasmid deposited with ATCC as Accession Number ______, for example, a fragment which can be used as a probe or primer or a fragment encoding a portion of a TWIK-6 protein, e.g., a biologically active portion of a TWIK-6 protein. The nucleotide sequence determined from the cloning of the TWIK-6 gene allows for the generation of probes and primers designed for use in identifying and/or cloning other TWIK-6 family members, as well as TWIK-6 homologues from other species. The probe/primer typically comprises substantially purified oligonucleotide. The oligonucleotide typically comprises a region of nucleotide sequence that hybridizes under stringent conditions to at least about 12 or 15, preferably about 20 or 25, more preferably about 30, 35, 40, 45, 50, 55, 60, 65, or 75 consecutive nucleotides of a sense sequence of SEQ ID NO:1 or 3, or the nucleotide sequence of the DNA insert of the plasmid deposited with ATCC as Accession Number ______, of an anti-sense sequence of SEQ ID NO:1 or 3, or SEQ ID NO:4 or 6, or the nucleotide sequence of the DNA insert of the plasmid deposited with ATCC as Accession Number ______, or of a naturally occurring allelic variant or mutant of SEQ ID NO:1 or 3, or SEQ ID NO:4 or 6, or the nucleotide sequence of the DNA insert of the plasmid deposited with ATCC as Accession Number ______. In one embodiment, a nucleic acid molecule of the present invention comprises a nucleotide sequence which is greater than 1050, 1051-1100, 1100-1150, 1150-1200, 1200-1250, 1250-1300, 1300-1350, 1350-1400, 1400-1450, 1450-1500 or more nucleotides in length and hybridizes under stringent hybridization conditions to a nucleic acid molecule of SEQ ID NO:1 or 3, or SEQ ID NO:4 or 6, or the nucleotide sequence of the DNA insert of the plasmid deposited with ATCC as Accession Number ______.

[0152] Probes based on the TWIK-6 nucleotide sequences can be used to detect transcripts or genomic sequences encoding the same or homologous proteins. In preferred embodiments, the probe further comprises a label group attached thereto, e.g., the label group can be a radioisotope, a fluorescent compound, an enzyme, or an enzyme co-factor. Such probes can be used as a part of a diagnostic test kit for identifying cells or tissue which misexpress a TWIK-6 protein, such as by measuring a level of a TWIK-6-encoding nucleic acid in a sample of cells from a subject e.g., detecting TWIK-6 mRNA levels or determining whether a genomic TWIK-6 gene has been mutated or deleted.

[0153] A nucleic acid fragment encoding a “biologically active portion of a TWIK-6 protein” can be prepared by isolating a portion of the nucleotide sequence of SEQ ID NO:1 or 3, or SEQ ID NO:4 or 6, or the nucleotide sequence of the DNA insert of the plasmid deposited with ATCC as Accession Number ______, which encodes a polypeptide having a TWIK-6 biological activity (the biological activities of the TWIK-6 proteins are described herein), expressing the encoded portion of the TWIK-6 protein (e.g., by recombinant expression in vitro) and assessing the activity of the encoded portion of the TWIK-6 protein.

[0154] The invention further encompasses nucleic acid molecules that differ from the nucleotide sequence shown in SEQ ID NO:1 or 3, or SEQ ID NO:4 or 6, or the nucleotide sequence of the DNA insert of the plasmid deposited with ATCC as Accession Number ______, due to degeneracy of the genetic code and thus encode the same TWIK-6 proteins as those encoded by the nucleotide sequence shown in SEQ ID NO:1 or 3, or SEQ ID NO:4 or 6, or the nucleotide sequence of the DNA insert of the plasmid deposited with ATCC as Accession Number ______. In another embodiment, an isolated nucleic acid molecule of the invention has a nucleotide sequence encoding a protein having an amino acid sequence shown in SEQ ID NO:2 or 5.

[0155] In addition to the TWIK-6 nucleotide sequences shown in SEQ ID NO:1 or 3, or SEQ ID NO:4 or 6, or the nucleotide sequence of the DNA insert of the plasmid deposited with ATCC as Accession Number ______, it will be appreciated by those skilled in the art that DNA sequence polymorphisms that lead to changes in the amino acid sequences of the TWIK-6 proteins may exist within a population (e.g., the human population). Such genetic polymorphism in the TWIK-6 genes may exist among individuals within a population due to natural allelic variation. As used herein, the terms “gene” and “recombinant gene” refer to nucleic acid molecules which include an open reading frame encoding a TWIK-6 protein, preferably a mammalian TWIK-6 protein, and can further include non-coding regulatory sequences, and introns.

[0156] Allelic variants of human TWIK-6 include both functional and non-functional TWIK-6 proteins. Functional allelic variants are naturally occurring amino acid sequence variants of the human TWIK-6 protein that maintain the ability to bind a TWIK-6 ligand or substrate and/or modulate cell proliferation and/or migration mechanisms. Functional allelic variants will typically contain only conservative substitution of one or more amino acids of SEQ ID NO:2 or 5, or substitution, deletion or insertion of non-critical residues in non-critical regions of the protein.

[0157] Non-functional allelic variants are naturally occurring amino acid sequence variants of the human TWIK-6 protein that do not have the ability to either bind a TWIK-6 ligand and/or modulate any of the TWIK-6 activities described herein. Non-functional allelic variants will typically contain a non-conservative substitution, a deletion, or insertion or premature truncation of the amino acid sequence of SEQ ID NO:2 or 5, or a substitution, insertion or deletion in critical residues or critical regions.

[0158] The present invention further provides non-human orthologues of the human TWIK-6 protein. Orthologues of the human TWIK-6 protein are proteins that are isolated from non-human organisms and possess the same TWIK-6 ligand binding and/or modulation of membrane excitability activities of the human TWIK-6 protein. Orthologues of the human TWIK-6 protein can readily be identified as comprising an amino acid sequence that is substantially identical to SEQ ID NO:2 or 5.

[0159] Moreover, nucleic acid molecules encoding other TWIK-6 family members and, thus, which have a nucleotide sequence which differs from the TWIK-6 sequences of SEQ ID NO:1 or 3, or SEQ ID NO:4 or 6, or the nucleotide sequence of the DNA insert of the plasmid deposited with ATCC as Accession Number ______ are intended to be within the scope of the invention. For example, another TWIK-6 cDNA can be identified based on the nucleotide sequence of human TWIK-6. Moreover, nucleic acid molecules encoding TWIK-6 proteins from different species, and which, thus, have a nucleotide sequence which differs from the TWIK-6 sequences of SEQ ID NO:1 or 3, or SEQ ID NO:4 or 6, or the nucleotide sequence of the DNA insert of the plasmid deposited with ATCC as Accession Number ______ are intended to be within the scope of the invention. For example, a mouse TWIK-6 cDNA can be identified based on the nucleotide sequence of a human TWIK-6.

[0160] Nucleic acid molecules corresponding to natural allelic variants and homologues of the TWIK-6 cDNAs of the invention can be isolated based on their homology to the TWIK-6 nucleic acids disclosed herein using the cDNAs disclosed herein, or a portion thereof, as a hybridization probe according to standard hybridization techniques under stringent hybridization conditions. Nucleic acid molecules corresponding to natural allelic variants and homologues of the TWIK-6 cDNAs of the invention can further be isolated by mapping to the same chromosome or locus as the TWIK-6 gene.

[0161] Accordingly, in another embodiment, an isolated nucleic acid molecule of the invention is at least 15, 20, 25, 30 or more nucleotides in length and hybridizes under stringent conditions to the nucleic acid molecule comprising the nucleotide sequence of SEQ ID NO:1 or 3, or SEQ ID NO:4 or 6, or the nucleotide sequence of the DNA insert of the plasmid deposited with ATCC as Accession Number ______. In other embodiment, the nucleic acid is at least 1050, 1051-1100, 1100-1150, 1150-1200, 1200-1250, 1250-1300, 1300-1350, 1350-1400, 1400-1450, 1450-1500, or more nucleotides in length. As used herein, the term “hybridizes under stringent conditions” is intended to describe conditions for hybridization and washing under which nucleotide sequences at least 60% identical to each other typically remain hybridized to each other. Preferably, the conditions are such that sequences at least about 70%, more preferably at least about 80%, even more preferably at least about 85% or 90% identical to each other typically remain hybridized to each other. Such stringent conditions are known to those skilled in the art and can be found in Current Protocols in Molecular Biology, John Wiley & Sons, N.Y. (1989), 6.3.1-6.3.6. A preferred, non-limiting example of stringent hybridization conditions are hybridization in 6×sodium chloride/sodium citrate (SSC) at about 45° C., followed by one or more washes in 0.2×SSC, 0.1% SDS at 50° C., preferably at 55° C., more preferably at 60° C., and even more preferably at 65° C. Ranges intermediate to the above-recited values, e.g., at 60-65° C. or at 55-60° C. are also intended to be encompassed by the present invention. Preferably, an isolated nucleic acid molecule of the invention that hybridizes under stringent conditions to the sequence of SEQ ID NO:1 or 3, or SEQ ID NO:4 or 6, and corresponds to a naturally-occurring nucleic acid molecule. As used herein, a “naturally-occurring” nucleic acid molecule refers to an RNA or DNA molecule having a nucleotide sequence that occurs in nature (e.g., encodes a natural protein).

[0162] In addition to naturally-occurring allelic variants of the TWIK-6 sequences that may exist in the population, the skilled artisan will further appreciate that changes can be introduced by mutation into the nucleotide sequences of SEQ ID NO:1 or 3, or SEQ ID NO:4 or 6, or the nucleotide sequence of the DNA insert of the plasmid deposited with ATCC as Accession Number ______, thereby leading to changes in the amino acid sequence of the encoded TWIK-6 proteins, without altering the functional ability of the TWIK-6 proteins. For example, nucleotide substitutions leading to amino acid substitutions at “non-essential” amino acid residues can be made in the sequence of SEQ ID NO:1 or 3, or SEQ ID NO:4 or 6, or the nucleotide sequence of the DNA insert of the plasmid deposited with ATCC as Accession Number ______. A “non-essential” amino acid residue is a residue that can be altered from the wild-type sequence of TWIK-6 (e.g., the sequence of SEQ ID NO:2 or 5) without altering the biological activity, whereas an “essential” amino acid residue is required for biological activity. For example, amino acid residues that are conserved among the TWIK-6 proteins of the present invention, e.g., those present in a transmembrane domain, are predicted to be particularly unamenable to alteration. Furthermore, additional amino acid residues that are conserved between the TWIK-6 proteins of the present invention and other members of the TWIK family are not likely to be amenable to alteration.

[0163] Accordingly, another aspect of the invention pertains to nucleic acid molecules encoding TWIK-6 proteins that contain changes in amino acid residues that are not essential for activity. Such TWIK-6 proteins differ in amino acid sequence from SEQ ID NO:2 or 5, yet retain biological activity. In one embodiment, the isolated nucleic acid molecule comprises a nucleotide sequence encoding a protein, wherein the protein comprises an amino acid sequence at least about 50%, 55%, 60%, 65%, 67%, 68%, 70%, 75%, 80%, 85%, 90%, 95%, 96%, 97%, 98%, 99% or more identical to SEQ ID NO:2 or 5.

[0164] An isolated nucleic acid molecule encoding a TWIK-6 protein identical to the protein of SEQ ID NO:2 or 5, can be created by introducing one or more nucleotide substitutions, additions or deletions into the nucleotide sequence of SEQ ID NO:1 or 3, or SEQ ID NO:4 or 6, or the nucleotide sequence of the DNA insert of the plasmid deposited with ATCC as Accession Number ______, such that one or more amino acid substitutions, additions or deletions are introduced into the encoded protein. Mutations can be introduced into SEQ ID NO:1 or 3, or SEQ ID NO:4 or 6, or the nucleotide sequence of the DNA insert of the plasmid deposited with ATCC as Accession Number ______ by standard techniques, such as site-directed mutagenesis and PCR-mediated mutagenesis. Preferably, conservative amino acid substitutions are made at one or more predicted non-essential amino acid residues. A “conservative amino acid substitution” is one in which the amino acid residue is replaced with an amino acid residue having a similar side chain. Families of amino acid residues having similar side chains have been defined in the art. These families include amino acids with basic side chains (e.g., lysine, arginine, histidine), acidic side chains (e.g., aspartic acid, glutamic acid), uncharged polar side chains (e.g., glycine, asparagine, glutamine, serine, threonine, tyrosine, cysteine), nonpolar side chains (e.g., alanine, valine, leucine, isoleucine, proline, phenylalanine, methionine, tryptophan), beta-branched side chains (e.g., threonine, valine, isoleucine) and aromatic side chains (e.g., tyrosine, phenylalanine, tryptophan, histidine). Thus, a predicted nonessential amino acid residue in a TWIK-6 protein is preferably replaced with another amino acid residue from the same side chain family. Alternatively, in another embodiment, mutations can be introduced randomly along all or part of a TWIK-6 coding sequence, such as by saturation mutagenesis, and the resultant mutants can be screened for TWIK-6 biological activity to identify mutants that retain activity. Following mutagenesis of SEQ ID NO:1 or 3, or SEQ ID NO:4 or 6, or the nucleotide sequence of the DNA insert of the plasmid deposited with ATCC as Accession Number ______, the encoded protein can be expressed recombinantly and the activity of the protein can be determined.

[0165] In a preferred embodiment, a mutant TWIK-6 protein can be assayed for the ability to (1) interact with a non-TWIK protein molecule; (2) activate a TWIK-dependent signal transduction pathway; (3) modulate the release of neurotransmitters; (4) modulate membrane excitability; (5) influence the resting potential of membranes, wave forms and frequencies of action potentials, and thresholds of excitation, and (6) modulate processes which underlie learning and memory, such as integration of sub-threshold synaptic responses and the conductance of back-propagating action potentials.

[0166] In addition to the nucleic acid molecules encoding TWIK-6 proteins described above, another aspect of the invention pertains to isolated nucleic acid molecules which are antisense thereto. An “antisense” nucleic acid comprises a nucleotide sequence which is complementary to a “sense” nucleic acid encoding a protein, e.g., complementary to the coding strand of a double-stranded cDNA molecule or complementary to an mRNA sequence. Accordingly, an antisense nucleic acid can hydrogen bond to a sense nucleic acid. The antisense nucleic acid can be complementary to an entire TWIK-6 coding strand, or to only a portion thereof. In one embodiment, an antisense nucleic acid molecule is antisense to a “coding region” of the coding strand of a nucleotide sequence encoding TWIK-6. The term “coding region” refers to the region of the nucleotide sequence comprising codons which are translated into amino acid residues (e.g., the coding region of human TWIK-6 corresponds to SEQ ID NO:3 or 6). In another embodiment, the antisense nucleic acid molecule is antisense to a “noncoding region” of the coding strand of a nucleotide sequence encoding TWIK-6. The term “noncoding region” refers to 5′ and 3′ sequences which flank the coding region that are not translated into amino acids (i.e., also referred to as 5′ and 3′ untranslated regions).

[0167] Given the coding strand sequences encoding TWIK-6 disclosed herein (e.g., SEQ ID NO:3 or 6), antisense nucleic acids of the invention can be designed according to the rules of Watson and Crick base pairing. The antisense nucleic acid molecule can be complementary to the entire coding region of TWIK-6 mRNA, but more preferably is an oligonucleotide which is antisense to only a portion of the coding or noncoding region of TWIK-6 mRNA. For example, the antisense oligonucleotide can be complementary to the region surrounding the translation start site of TWIK-6 mRNA. An antisense oligonucleotide can be, for example, about 5, 10, 15, 20, 25, 30, 35, 40, 45 or 50 nucleotides in length. An antisense nucleic acid of the invention can be constructed using chemical synthesis and enzymatic ligation reactions using procedures known in the art. For example, an antisense nucleic acid (e.g., an antisense oligonucleotide) can be chemically synthesized using naturally occurring nucleotides or variously modified nucleotides designed to increase the biological stability of the molecules or to increase the physical stability of the duplex formed between the antisense and sense nucleic acids, e.g., phosphorothioate derivatives and acridine substituted nucleotides can be used. Examples of modified nucleotides which can be used to generate the antisense nucleic acid include 5-fluorouracil, 5-bromouracil, 5-chlorouracil, 5-iodouracil, hypoxanthine, xantine, 4-acetylcytosine, 5-(carboxyhydroxylmethyl) uracil, 5-carboxymethylaminomethyl-2-thiouridine, 5-carboxymethylaminomethyluracil, dihydrouracil, beta-D-galactosylqueosine, inosine, N6-isopentenyladenine, 1-methylguanine, 1-methylinosine, 2,2-dimethylguanine, 2-methyladenine, 2-methylguanine, 3-methylcytosine, 5-methylcytosine, N6-adenine, 7-methylguanine, 5-methylaminomethyluracil, 5-methoxyaminomethyl-2-thiouracil, beta-D-mannosylqueosine, 5′-methoxycarboxymethyluracil, 5-methoxyuracil, 2-methylthio-N6-isopentenyladenine, uracil-5-oxyacetic acid (v), wybutoxosine, pseudouracil, queosine, 2-thiocytosine, 5-methyl-2-thiouracil, 2-thiouracil, 4-thiouracil, 5-methyluracil, uracil-5- oxyacetic acid methylester, uracil-5-oxyacetic acid (v), 5-methyl-2-thiouracil, 3-(3-amino-3-N-2-carboxypropyl) uracil, (acp3)w, and 2,6-diaminopurine. Alternatively, the antisense nucleic acid can be produced biologically using an expression vector into which a nucleic acid has been subcloned in an antisense orientation (i.e., RNA transcribed from the inserted nucleic acid will be of an antisense orientation to a target nucleic acid of interest, described further in the following subsection).

[0168] The antisense nucleic acid molecules of the invention are typically administered to a subject or generated in situ such that they hybridize with or bind to cellular mRNA and/or genomic DNA encoding a TWIK-6 protein to thereby inhibit expression of the protein, e.g., by inhibiting transcription and/or translation. The hybridization can be by conventional nucleotide complementarity to form a stable duplex, or, for example, in the case of an antisense nucleic acid molecule which binds to DNA duplexes, through specific interactions in the major groove of the double helix. An example of a route of administration of antisense nucleic acid molecules of the invention include direct injection at a tissue site. Alternatively, antisense nucleic acid molecules can be modified to target selected cells and then administered systemically. For example, for systemic administration, antisense molecules can be modified such that they specifically bind to receptors or antigens expressed on a selected cell surface, e.g., by linking the antisense nucleic acid molecules to peptides or antibodies which bind to cell surface receptors or antigens. The antisense nucleic acid molecules can also be delivered to cells using the vectors described herein. To achieve sufficient intracellular concentrations of the antisense molecules, vector constructs in which the antisense nucleic acid molecule is placed under the control of a strong pol II or pol III promoter are preferred.

[0169] In yet another embodiment, the antisense nucleic acid molecule of the invention is an α-anomeric nucleic acid molecule. An α-anomeric nucleic acid molecule forms specific double-stranded hybrids with complementary RNA in which, contrary to the usual β-units, the strands run parallel to each other (Gaultier et al. (1987) Nucleic Acids. Res. 15:6625-6641). The antisense nucleic acid molecule can also comprise a 2′-o-methylribonucleotide (Inoue et al. (1987) Nucleic Acids Res. 15:6131-6148) or a chimeric RNA-DNA analogue (Inoue et al. (1987) FEBS Lett. 215:327-330).

[0170] In still another embodiment, an antisense nucleic acid of the invention is a ribozyme. Ribozymes are catalytic RNA molecules with ribonuclease activity which are capable of cleaving a single-stranded nucleic acid, such as an mRNA, to which they have a complementary region. Thus, ribozymes (e.g., hammerhead ribozymes (described in Haseloff and Gerlach (1988) Nature 334:585-591)) can be used to catalytically cleave TWIK-6 mRNA transcripts to thereby inhibit translation of TWIK-6 mRNA. A ribozyme having specificity for a TWIK-6-encoding nucleic acid can be designed based upon the nucleotide sequence of a TWIK-6 cDNA disclosed herein (i.e., SEQ ID NO:1 or 3, or SEQ ID NO:4 or 6, or the nucleotide sequence of the DNA insert of the plasmid deposited with ATCC as Accession Number ______). For example, a derivative of a Tetrahymena L-19 IVS RNA can be constructed in which the nucleotide sequence of the active site is complementary to the nucleotide sequence to be cleaved in a TWIK-6-encoding mRNA. See, e.g., Cech et al. U.S. Pat. No. 4,987,071; and Cech et al. U.S. Pat. No. 5,116,742. Alternatively, TWIK-6 mRNA can be used to select a catalytic RNA having a specific ribonuclease activity from a pool of RNA molecules. See, e.g., Bartel, D. and Szostak, J. W. (1993) Science 261:1411-1418.

[0171] Alternatively, TWIK-6 gene expression can be inhibited by targeting nucleotide sequences complementary to the regulatory region of the TWIK-6 (e.g., the TWIK-6 promoter and/or enhancers; e.g., nucleotides 1-102 of SEQ ID NO:1 or 4) to form triple helical structures that prevent transcription of the TWIK-6 gene in target cells. See generally, Helene, C. (1991) Anticancer Drug Des. 6(6):569-84; Helene, C. et al. (1992) Ann. N.Y. Acad. Sci. 660:27-36; and Maher, L. J. (1992) Bioassays 14(12):807-15.

[0172] In yet another embodiment, the TWIK-6 nucleic acid molecules of the present invention can be modified at the base moiety, sugar moiety or phosphate backbone to improve, e.g., the stability, hybridization, or solubility of the molecule. For example, the deoxyribose phosphate backbone of the nucleic acid molecules can be modified to generate peptide nucleic acids (see Hyrup B. et al. (1996) Bioorganic & Medicinal Chemistry 4 (1): 5-23). As used herein, the terms “peptide nucleic acids” or “PNAs” refer to nucleic acid mimics, e.g., DNA mimics, in which the deoxyribose phosphate backbone is replaced by a pseudopeptide backbone and only the four natural nucleobases are retained. The neutral backbone of PNAs has been shown to allow for specific hybridization to DNA and RNA under conditions of low ionic strength. The synthesis of PNA oligomers can be performed using standard solid phase peptide synthesis protocols as described in Hyrup B. et al. (1996) supra; Perry-O'Keefe et al. Proc. Natl. Acad. Sci. 93: 14670-675.

[0173] PNAs of TWIK-6 nucleic acid molecules can be used in therapeutic and diagnostic applications. For example, PNAs can be used as antisense or antigene agents for sequence-specific modulation of gene expression by, for example, inducing transcription or translation arrest or inhibiting replication. PNAs of TWIK-6 nucleic acid molecules can also be used in the analysis of single base pair mutations in a gene, (e.g., by PNA-directed PCR clamping); as ‘artificial restriction enzymes’ when used in combination with other enzymes, (e.g., S1 nucleases (Hyrup B. (1996) supra)); or as probes or primers for DNA sequencing or hybridization (Hyrup B. et al. (1996) supra; Perry-O'Keefe supra).

[0174] In another embodiment, PNAs of TWIK-6 can be modified, (e.g., to enhance their stability or cellular uptake), by attaching lipophilic or other helper groups to PNA, by the formation of PNA-DNA chimeras, or by the use of liposomes or other techniques of drug delivery known in the art. For example, PNA-DNA chimeras of TWIK-6 nucleic acid molecules can be generated which may combine the advantageous properties of PNA and DNA. Such chimeras allow DNA recognition enzymes, (e.g., RNAse H and DNA polymerases), to interact with the DNA portion while the PNA portion would provide high binding affinity and specificity. PNA-DNA chimeras can be linked using linkers of appropriate lengths selected in terms of base stacking, number of bonds between the nucleobases, and orientation (Hyrup B. (1996) supra). The synthesis of PNA-DNA chimeras can be performed as described in Hyrup B. (1996) supra and Finn P. J. et al. (1996) Nucleic Acids Res. 24 (17): 3357-63. For example, a DNA chain can be synthesized on a solid support using standard phosphoramidite coupling chemistry and modified nucleoside analogs, e.g., 5′-(4-methoxytrityl)amino-5′-deoxy-thymidine phosphoramidite, can be used as a between the PNA and the 5′ end of DNA (Mag, M. et al. (1989) Nucleic Acid Res. 17: 5973-88). PNA monomers are then coupled in a stepwise manner to produce a chimeric molecule with a 5′ PNA segment and a 3′ DNA segment (Finn P. J. et al. (1996) supra). Alternatively, chimeric molecules can be synthesized with a 5′ DNA segment and a 3′ PNA segment (Peterser, K. H. et al. (1975) Bioorganic Med. Chem. Lett. 5: 1119-11124).

[0175] In other embodiments, the oligonucleotide may include other appended groups such as peptides (e.g., for targeting host cell receptors in vivo), or agents facilitating transport across the cell membrane (see, e.g., Letsinger et al. (1989) Proc. Natl. Acad. Sci. USA 86:6553-6556; Lemaitre et al. (1987) Proc. Natl. Acad. Sci. USA 84:648-652; PCT Publication No. W088/09810) or the blood-brain barrier (see, e.g., PCT Publication No. W089/10134). In addition, oligonucleotides can be modified with hybridization-triggered cleavage agents (See, e.g., Krol et al. (1988) Bio-Techniques 6:958-976) or intercalating agents. (See, e.g., Zon (1988) Pharm. Res. 5:539-549). To this end, the oligonucleotide may be conjugated to another molecule, (e.g., a peptide, hybridization triggered cross-linking agent, transport agent, or hybridization-triggered cleavage agent).

[0176] Alternatively, the expression characteristics of an endogenous TWIK-6 gene within a cell line or microorganism may be modified by inserting a heterologous DNA regulatory element into the genome of a stable cell line or cloned microorganism such that the inserted regulatory element is operatively linked with the endogenous TWIK-6 gene. For example, an endogenous TWIK-6 gene which is normally “transcriptionally silent”, i.e., a TWIK-6 gene which is normally not expressed, or is expressed only at very low levels in a cell line or microorganism, may be activated by inserting a regulatory element which is capable of promoting the expression of a normally expressed gene product in that cell line or microorganism. Alternatively, a transcriptionally silent, endogenous TWIK-6 gene may be activated by insertion of a promiscuous regulatory element that works across cell types.

[0177] A heterologous regulatory element may be inserted into a stable cell line or cloned microorganism, such that it is operatively linked with an endogenous TWIK-6 gene, using techniques, such as targeted homologous recombination, which are well known to those of skill in the art, and described, e.g., in Chappel, U.S. Pat. No. 5,272,071; PCT publication No. WO 91/06667, published May 16, 1991.

[0178] II. Isolated TWIK-6 Proteins and Anti-TWIK-6 Antibodies

[0179] One aspect of the invention pertains to isolated TWIK-6 proteins, and biologically active portions thereof, as well as polypeptide fragments suitable for use as immunogens to raise anti-TWIK-6 antibodies. In one embodiment, native TWIK-6 proteins can be isolated from cells or tissue sources by an appropriate purification scheme using standard protein purification techniques. In another embodiment, TWIK-6 proteins are produced by recombinant DNA techniques. Alternative to recombinant expression, a TWIK-6 protein or polypeptide can be synthesized chemically using standard peptide synthesis techniques.

[0180] An “isolated” or “purified” protein or biologically active portion thereof is substantially free of cellular material or other contaminating proteins from the cell or tissue source from which the TWIK-6 protein is derived, or substantially free from chemical precursors or other chemicals when chemically synthesized. The language “substantially free of cellular material” includes preparations of TWIK-6 protein in which the protein is separated from cellular components of the cells from which it is isolated or recombinantly produced. In one embodiment, the language “substantially free of cellular material” includes preparations of TWIK-6 protein having less than about 30% (by dry weight) of non-TWIK-6 protein (also referred to herein as a “contaminating protein”), more preferably less than about 20% of non-TWIK-6 protein, still more preferably less than about 10% of non-TWIK-6 protein, and most preferably less than about 5% non-TWIK-6 protein. When the TWIK-6 protein or biologically active portion thereof is recombinantly produced, it is also preferably substantially free of culture medium, i.e., culture medium represents less than about 20%, more preferably less than about 10%, and most preferably less than about 5% of the volume of the protein preparation.

[0181] The language “substantially free of chemical precursors or other chemicals” includes preparations of TWIK-6 protein in which the protein is separated from chemical precursors or other chemicals which are involved in the synthesis of the protein. In one embodiment, the language “substantially free of chemical precursors or other chemicals” includes preparations of TWIK-6 protein having less than about 30% (by dry weight) of chemical precursors or non-TWIK-6 chemicals, more preferably less than about 20% chemical precursors or non-TWIK-6 chemicals, still more preferably less than about 10% chemical precursors or non-TWIK-6 chemicals, and most preferably less than about 5% chemical precursors or non-TWIK-6 chemicals.

[0182] As used herein, a “biologically active portion” of a TWIK-6 protein includes a fragment of a TWIK-6 protein which participates in an interaction between a TWIK-6 molecule and a non-TWIK-6 molecule. Biologically active portions of a TWIK-6 protein include peptides comprising amino acid sequences sufficiently identical to or derived from the amino acid sequence of the TWIK-6 protein, e.g., the amino acid sequence shown in SEQ ID NO:2 or 5, which include less amino acids than the full length TWIK-6 proteins, and exhibit at least one activity of a TWIK-6 protein. Typically, biologically active portions comprise a domain or motif with at least one activity of the TWIK-6 protein, e.g., modulating membrane excitability. A biologically active portion of a TWIK-6 protein can be a polypeptide which is, for example, 25, 50, 75, 100, 125, 150, 175, 200 or more amino acids in length. Biologically active portions of a TWIK-6 protein can be used as targets for developing agents which modulate a TWIK-6 mediated activity, e.g., modulation of membrane excitability.

[0183] In one embodiment, a biologically active portion of a TWIK-6 protein comprises at least one transmembrane domain. It is to be understood that a preferred biologically active portion of a TWIK-6 protein of the present invention may contain at least one transmembrane domain and one or more of the following domains: a TWIK-related ion channel domain, a P-loop domain, and a potassium channel protein domain. Moreover, other biologically active portions, in which other regions of the protein are deleted, can be prepared by recombinant techniques and evaluated for one or more of the functional activities of a native TWIK-6 protein.

[0184] In a preferred embodiment, the TWIK-6 protein has an amino acid sequence shown in SEQ ID NO:2 or 5. In other embodiments, the TWIK-6 protein is substantially identical to SEQ ID NO:2 or 5, and retains the functional activity of the protein of SEQ ID NO:2 or 5, yet differs in amino acid sequence due to natural allelic variation or mutagenesis, as described in detail in subsection I above. Accordingly, in another embodiment, the TWIK-6 protein is a protein which comprises an amino acid sequence at least about 50%, 55%, 60%, 65%, 67%, 68%, 70%, 75%, 80%, 85%, 90%, 95%, 96%, 97%, 98%, 99% or more identical to SEQ ID NO:2 or 5.

[0185] To determine the percent identity of two amino acid sequences or of two nucleic acid sequences, the sequences are aligned for optimal comparison purposes (e.g., gaps can be introduced in one or both of a first and a second amino acid or nucleic acid sequence for optimal alignment and non-identical sequences can be disregarded for comparison purposes). In a preferred embodiment, the length of a reference sequence aligned for comparison purposes is at least 30%, preferably at least 40%, more preferably at least 50%, even more preferably at least 60%, and even more preferably at least 70%, 80%, or 90% of the length of the reference sequence (e.g., when aligning a second sequence to the TWIK-6 amino acid sequence of SEQ ID NO:2 or 5 having 400 amino acid residues, at least 50, preferably at least 100, more preferably at least 150, even more preferably at least 200, and even more preferably at least 300 or more amino acid residues are aligned). The amino acid residues or nucleotides at corresponding amino acid positions or nucleotide positions are then compared. When a position in the first sequence is occupied by the same amino acid residue or nucleotide as the corresponding position in the second sequence, then the molecules are identical at that position (as used herein amino acid or nucleic acid “identity” is equivalent to amino acid or nucleic acid “homology”). The percent identity between the two sequences is a function of the number of identical positions shared by the sequences, taking into account the number of gaps, and the length of each gap, which need to be introduced for optimal alignment of the two sequences.

[0186] The comparison of sequences and determination of percent identity between two sequences can be accomplished using a mathematical algorithm. In a preferred embodiment, the percent identity between two amino acid sequences is determined using the Needleman and Wunsch (J. Mol. Biol. (48):444-453 (1970)) algorithm which has been incorporated into the GAP program in the GCG software package (available at http://www.gcg.com), using either a Blosum 62 matrix or a PAM250 matrix, and a gap weight of 16, 14, 12, 10, 8, 6, or 4 and a length weight of 1, 2, 3, 4, 5, or 6. In yet another preferred embodiment, the percent identity between two nucleotide sequences is determined using the GAP program in the GCG software package (available at http://www.gcg.com), using a NWSgapdna.CMP matrix and a gap weight of 40, 50, 60, 70, or 80 and a length weight of 1, 2, 3, 4, 5, or 6. In another embodiment, the percent identity between two amino acid or nucleotide sequences is determined using the algorithm of E. Meyers and W. Miller (Comput. Appl. Biosci., 4: 11-17 (1988)) which has been incorporated into the ALIGN program (version 2.0), using a PAM120 weight residue table, a gap length penalty of 12 and a gap penalty of 4.

[0187] The nucleic acid and protein sequences of the present invention can further be used as a “query sequence” to perform a search against public databases to, for example, identify other family members or related sequences. Such searches can be performed using the NBLAST and XBLAST programs (version 2.0) of Altschul, et al. (1990) J. Mol. Biol. 215:403-10. BLAST nucleotide searches can be performed with the NBLAST program, score=100, wordlength=12 to obtain nucleotide sequences homologous to TWIK-6 nucleic acid molecules of the invention. BLAST protein searches can be performed with the XBLAST program, score=100, wordlength=3 to obtain amino acid sequences homologous to TWIK-6 protein molecules of the invention. To obtain gapped alignments for comparison purposes, Gapped BLAST can be utilized as described in Altschul et al., (1997) Nucleic Acids Res. 25(17):3389-3402. When utilizing BLAST and Gapped BLAST programs, the default parameters of the respective programs (e.g., XBLAST and NBLAST) can be used. See http://www.ncbi.nlm.nih.gov.

[0188] The invention also provides TWIK-6 chimeric or fusion proteins. As used herein, a TWIK-6 “chimeric protein” or “fusion protein” comprises a TWIK-6 polypeptide operatively linked to a non-TWIK-6 polypeptide. An “TWIK-6 polypeptide” refers to a polypeptide having an amino acid sequence corresponding to TWIK-6, whereas a “non-TWIK-6 polypeptide” refers to a polypeptide having an amino acid sequence corresponding to a protein which is not substantially homologous to the TWIK-6 protein, e.g., a protein which is different from the TWIK-6 protein and which is derived from the same or a different organism. Within a TWIK-6 fusion protein the TWIK-6 polypeptide can correspond to all or a portion of a TWIK-6 protein. In a preferred embodiment, a TWIK-6 fusion protein comprises at least one biologically active portion of a TWIK-6 protein. In another preferred embodiment, a TWIK-6 fusion protein comprises at least two biologically active portions of a TWIK-6 protein. Within the fusion protein, the term “operatively linked” is intended to indicate that the TWIK-6 polypeptide and the non-TWIK-6 polypeptide are fused in-frame to each other. The non-TWIK-6 polypeptide can be fused to the N-terminus or C-terminus of the TWIK-6 polypeptide.

[0189] For example, in one embodiment, the fusion protein is a GST-TWIK-6 fusion protein in which the TWIK-6 sequences are fused to the C-terminus of the GST sequences. Such fusion proteins can facilitate the purification of recombinant TWIK-6.

[0190] In another embodiment, the fusion protein is a TWIK-6 protein containing a heterologous signal sequence at its N-terminus. In certain host cells (e.g., mammalian host cells), expression and/or secretion of TWIK-6 can be increased through use of a heterologous signal sequence.

[0191] The TWIK-6 fusion proteins of the invention can be incorporated into pharmaceutical compositions and administered to a subject in vivo. The TWIK-6 fusion proteins can be used to affect the bioavailability of a TWIK-6 substrate. Use of TWIK-6 fusion proteins may be useful therapeutically for the treatment of disorders caused by, for example, (i) aberrant modification or mutation of a gene encoding a TWIK-6 protein; (ii) mis-regulation of the TWIK-6 gene; and (iii) aberrant post-translational modification of a TWIK-6 protein.

[0192] Moreover, the TWIK-6-fusion proteins of the invention can be used as immunogens to produce anti-TWIK-6 antibodies in a subject, to purify TWIK-6 ligands and in screening assays to identify molecules which inhibit the interaction of TWIK-6 with a TWIK-6 substrate.

[0193] Preferably, a TWIK-6 chimeric or fusion protein of the invention is produced by standard recombinant DNA techniques. For example, DNA fragments coding for the different polypeptide sequences are ligated together in-frame in accordance with conventional techniques, for example by employing blunt-ended or stagger-ended termini for ligation, restriction enzyme digestion to provide for appropriate termini, filling-in of cohesive ends as appropriate, alkaline phosphatase treatment to avoid undesirable joining, and enzymatic ligation. In another embodiment, the fusion gene can be synthesized by conventional techniques including automated DNA synthesizers. Alternatively, PCR amplification of gene fragments can be carried out using anchor primers which give rise to complementary overhangs between two consecutive gene fragments which can subsequently be annealed and reamplified to generate a chimeric gene sequence (see, for example, Current Protocols in Molecular Biology, eds. Ausubel et al. John Wiley & Sons: 1992). Moreover, many expression vectors are commercially available that already encode a fusion moiety (e.g., a GST polypeptide). A TWIK-6-encoding nucleic acid can be cloned into such an expression vector such that the fusion moiety is linked in-frame to the TWIK-6 protein.

[0194] The present invention also pertains to variants of the TWIK-6 proteins which function as either TWIK-6 agonists (mimetics) or as TWIK-6 antagonists. Variants of the TWIK-6 proteins can be generated by mutagenesis, e.g., discrete point mutation or truncation of a TWIK-6 protein. An agonist of the TWIK-6 proteins can retain substantially the same, or a subset, of the biological activities of the naturally occurring form of a TWIK-6 protein. An antagonist of a TWIK-6 protein can inhibit one or more of the activities of the naturally occurring form of the TWIK-6 protein by, for example, competitively modulating a TWIK-6-mediated activity of a TWIK-6 protein. Thus, specific biological effects can be elicited by treatment with a variant of limited function. In one embodiment, treatment of a subject with a variant having a subset of the biological activities of the naturally occurring form of the protein has fewer side effects in a subject relative to treatment with the naturally occurring form of the TWIK-6 protein.

[0195] In one embodiment, variants of a TWIK-6 protein which function as either TWIK-6 agonists (mimetics) or as TWIK-6 antagonists can be identified by screening combinatorial libraries of mutants, e.g., truncation mutants, of a TWIK-6 protein for TWIK-6 protein agonist or antagonist activity. In one embodiment, a variegated library of TWIK-6 variants is generated by combinatorial mutagenesis at the nucleic acid level and is encoded by a variegated gene library. A variegated library of TWIK-6 variants can be produced by, for example, enzymatically ligating a mixture of synthetic oligonucleotides into gene sequences such that a degenerate set of potential TWIK-6 sequences is expressible as individual polypeptides, or alternatively, as a set of larger fusion proteins (e.g., for phage display) containing the set of TWIK-6 sequences therein. There are a variety of methods which can be used to produce libraries of potential TWIK-6 variants from a degenerate oligonucleotide sequence. Chemical synthesis of a degenerate gene sequence can be performed in an automatic DNA synthesizer, and the synthetic gene then ligated into an appropriate expression vector. Use of a degenerate set of genes allows for the provision, in one mixture, of all of the sequences encoding the desired set of potential TWIK-6 sequences. Methods for synthesizing degenerate oligonucleotides are known in the art (see, e.g., Narang, S. A. (1983) Tetrahedron 39:3; Itakura et al. (1984) Annu. Rev. Biochem. 53:323; Itakura et al. (1984) Science 198:1056; Ike et al. (1983) Nucleic Acid Res. 11:477.

[0196] In addition, libraries of fragments of a TWIK-6 protein coding sequence can be used to generate a variegated population of TWIK-6 fragments for screening and subsequent selection of variants of a TWIK-6 protein. In one embodiment, a library of coding sequence fragments can be generated by treating a double stranded PCR fragment of a TWIK-6 coding sequence with a nuclease under conditions wherein nicking occurs only about once per molecule, denaturing the double stranded DNA, renaturing the DNA to form double stranded DNA which can include sense/antisense pairs from different nicked products, removing single stranded portions from reformed duplexes by treatment with S1 nuclease, and ligating the resulting fragment library into an expression vector. By this method, an expression library can be derived which encodes N-terminal, C-terminal and internal fragments of various sizes of the TWIK-6 protein.

[0197] Several techniques are known in the art for screening gene products of combinatorial libraries made by point mutations or truncation, and for screening cDNA libraries for gene products having a selected property. Such techniques are adaptable for rapid screening of the gene libraries generated by the combinatorial mutagenesis of TWIK-6 proteins. The most widely used techniques, which are amenable to high through-put analysis, for screening large gene libraries typically include cloning the gene library into replicable expression vectors, transforming appropriate cells with the resulting library of vectors, and expressing the combinatorial genes under conditions in which detection of a desired activity facilitates isolation of the vector encoding the gene whose product was detected. Recursive ensemble mutagenesis (REM), a new technique which enhances the frequency of functional mutants in the libraries, can be used in combination with the screening assays to identify TWIK-6 variants (Arkin and Youvan (1992) Proc. Natl. Acad. Sci. USA 89:7811-7815; Delagrave et al. (1993) Protein Engineering 6(3): 327-331).

[0198] In one embodiment, cell based assays can be exploited to analyze a variegated TWIK-6 library. For example, a library of expression vectors can be transfected into a cell line, e.g., a neuronal cell line, which ordinarily responds to a TWIK-6 ligand in a particular TWIK-6 ligand-dependent manner. The transfected cells are then contacted with a TWIK-6 ligand and the effect of expression of the mutant on, e.g., membrane excitability of TWIK-6 can be detected. Plasmid DNA can then be recovered from the cells which score for inhibition, or alternatively, potentiation of signaling by the TWIK-6 ligand, and the individual clones further characterized.

[0199] An isolated TWIK-6 protein, or a portion or fragment thereof, can be used as an immunogen to generate antibodies that bind TWIK-6 using standard techniques for polyclonal and monoclonal antibody preparation. A full-length TWIK-6 protein can be used or, alternatively, the invention provides antigenic peptide fragments of TWIK-6 for use as immunogens. The antigenic peptide of TWIK-6 comprises at least 8 amino acid residues of the amino acid sequence shown in SEQ ID NO:2 or 5 and encompasses an epitope of TWIK-6 such that an antibody raised against the peptide forms a specific immune complex with TWIK-6. Preferably, the antigenic peptide comprises at least 10 amino acid residues, more preferably at least 15 amino acid residues, even more preferably at least 20 amino acid residues, and most preferably at least 30 amino acid residues.

[0200] Preferred epitopes encompassed by the antigenic peptide are regions of TWIK-6 that are located on the surface of the protein, e.g., hydrophilic regions, as well as regions with high antigenicity (see, for example, FIG. 3).

[0201] A TWIK-6 immunogen typically is used to prepare antibodies by immunizing a suitable subject, (e.g., rabbit, goat, mouse or other mammal) with the immunogen. An appropriate immunogenic preparation can contain, for example, recombinantly expressed TWIK-6 protein or a chemically synthesized TWIK-6 polypeptide. The preparation can further include an adjuvant, such as Freund's complete or incomplete adjuvant, or similar immunostimulatory agent. Immunization of a suitable subject with an immunogenic TWIK-6 preparation induces a polyclonal anti-TWIK-6 antibody response.

[0202] Accordingly, another aspect of the invention pertains to anti-TWIK-6 antibodies. The term “antibody” as used herein refers to immunoglobulin molecules and immunologically active portions of immunoglobulin molecules, i.e., molecules that contain an antigen binding site which specifically binds (immunoreacts with) an antigen, such as TWIK-6. Examples of immunologically active portions of immunoglobulin molecules include F(ab) and F(ab′)₂ fragments which can be generated by treating the antibody with an enzyme such as pepsin. The invention provides polyclonal and monoclonal antibodies that bind TWIK-6. The term “monoclonal antibody” or “monoclonal antibody composition”, as used herein, refers to a population of antibody molecules that contain only one species of an antigen binding site capable of immunoreacting with a particular epitope of TWIK-6. A monoclonal antibody composition thus typically displays a single binding affinity for a particular TWIK-6 protein with which it immunoreacts.

[0203] Polyclonal anti-TWIK-6 antibodies can be prepared as described above by immunizing a suitable subject with a TWIK-6 immunogen. The anti-TWIK-6 antibody titer in the immunized subject can be monitored over time by standard techniques, such as with an enzyme linked immunosorbent assay (ELISA) using immobilized TWIK-6. If desired, the antibody molecules directed against TWIK-6 can be isolated from the mammal (e.g., from the blood) and further purified by well known techniques, such as protein A chromatography to obtain the IgG fraction. At an appropriate time after immunization, e.g., when the anti-TWIK-6 antibody titers are highest, antibody-producing cells can be obtained from the subject and used to prepare monoclonal antibodies by standard techniques, such as the hybridoma technique originally described by Kohler and Milstein (1975) Nature 256:495-497) (see also, Brown et al. (1981) J. Immunol. 127:539-46; Brown et al. (1980) J. Biol. Chem. 255:4980-83; Yeh et al. (1976) Proc. Natl. Acad. Sci. USA 76:2927-31; and Yeh et al. (1982) Int. J. Cancer 29:269-75), the more recent human B cell hybridoma technique (Kozbor et al. (1983) Immunol Today 4:72), the EBV-hybridoma technique (Cole et al. (1985), Monoclonal Antibodies and Cancer Therapy, Alan R. Liss, Inc., pp. 77-96) or trioma techniques. The technology for producing monoclonal antibody hybridomas is well known (see generally R. H. Kenneth, in Monoclonal Antibodies: A New Dimension In Biological Analyses, Plenum Publishing Corp., New York, N.Y. (1980); E. A. Lerner (1981) Yale J. Biol. Med., 54:387-402; M. L. Gefter et al. (1977) Somatic Cell Genet. 3:231-36). Briefly, an immortal cell line (typically a myeloma) is fused to lymphocytes (typically splenocytes) from a mammal immunized with a TWIK-6 immunogen as described above, and the culture supernatants of the resulting hybridoma cells are screened to identify a hybridoma producing a monoclonal antibody that binds TWIK-6.

[0204] Any of the many well known protocols used for fusing lymphocytes and immortalized cell lines can be applied for the purpose of generating an anti-TWIK-6 monoclonal antibody (see, e.g., G. Galfre et al. (1977) Nature 266:55052; Gefter et al. Somatic Cell Genet., cited supra; Lerner, Yale J. Biol. Med., cited supra; Kenneth, Monoclonal Antibodies, cited supra). Moreover, the ordinarily skilled worker will appreciate that there are many variations of such methods which also would be useful. Typically, the immortal cell line (e.g., a myeloma cell line) is derived from the same mammalian species as the lymphocytes. For example, murine hybridomas can be made by fusing lymphocytes from a mouse immunized with an immunogenic preparation of the present invention with an immortalized mouse cell line. Preferred immortal cell lines are mouse myeloma cell lines that are sensitive to culture medium containing hypoxanthine, aminopterin and thymidine (“HAT medium”). Any of a number of myeloma cell lines can be used as a fusion partner according to standard techniques, e.g., the P3-NS1/1-Ag4-1, P3-x63-Ag8.653 or Sp2/O-Ag14 myeloma lines. These myeloma lines are available from ATCC Typically, HAT-sensitive mouse myeloma cells are fused to mouse splenocytes using polyethylene glycol (“PEG”). Hybridoma cells resulting from the fusion are then selected using HAT medium, which kills unfused and unproductively fused myeloma cells (unfused splenocytes die after several days because they are not transformed). Hybridoma cells producing a monoclonal antibody of the invention are detected by screening the hybridoma culture supernatants for antibodies that bind TWIK-6, e.g., using a standard ELISA assay.

[0205] Alternative to preparing monoclonal antibody-secreting hybridomas, a monoclonal anti-TWIK-6 antibody can be identified and isolated by screening a recombinant combinatorial immunoglobulin library (e.g., an antibody phage display library) with TWIK-6 to thereby isolate immunoglobulin library members that bind TWIK-6. Kits for generating and screening phage display libraries are commercially available (e.g., the Pharmacia Recombinant Phage Antibody System, Catalog No. 27-9400-01; and the Stratagene SurfZAP™ Phage Display Kit, Catalog No. 240612). Additionally, examples of methods and reagents particularly amenable for use in generating and screening antibody display library can be found in, for example, Ladner et al. U.S. Pat. No. 5,223,409; Kang et al. PCT International Publication No. WO 92/18619; Dower et al. PCT International Publication No. WO 91/17271; Winter et al. PCT International Publication WO 92/20791; Markland et al. PCT International Publication No. WO 92/15679; Breitling et al. PCT International Publication WO 93/01288; McCafferty et al. PCT International Publication No. WO 92/01047; Garrard et al. PCT International Publication No. WO 92/09690; Ladner et al. PCT International Publication No. WO 90/02809; Fuchs et al. (1991) Bio/Technology 9:1370-1372; Hay et al. (1992) Hum. Antibod Hybridomas 3:81-85; Huse et al. (1989) Science 246:1275-1281; Griffiths et al. (1993) EMBO J 12:725-734; Hawkins et al. (1992) J. Mol. Biol 226:889-896; Clackson et al. (1991) Nature 352:624-628; Gram et al. (1992) Proc. Natl. Acad. Sci. USA 89:3576-3580; Garrard et al. (1991) Bio/Technology 9:1373-1377; Hoogenboom et al. (1991) Nuc. Acid Res. 19:4133-4137; Barbas et al. (1991) Proc. Natl. Acad. Sci. USA 88:7978-7982; and McCafferty et al. Nature (1990) 348:552-554.

[0206] Additionally, recombinant anti-TWIK-6 antibodies, such as chimeric and humanized monoclonal antibodies, comprising both human and non-human portions, which can be made using standard recombinant DNA techniques, are within the scope of the invention. Such chimeric and humanized monoclonal antibodies can be produced by recombinant DNA techniques known in the art, for example using methods described in Robinson et al. International Application No. PCT/US86/02269; Akira, et al. European Patent Application 184,187; Taniguchi, M., European Patent Application 171,496; Morrison et al. European Patent Application 173,494; Neuberger et al. PCT International Publication No. WO 86/01533; Cabilly et al. U.S. Pat. No. 4,816,567; Cabilly et al. European Patent Application 125,023; Better et al. (1988) Science 240:1041-1043; Liu et al. (1987) Proc. Natl. Acad. Sci. USA 84:3439-3443; Liu et al. (1987) J. Immunol. 139:3521-3526; Sun et al. (1987) Proc. Natl. Acad. Sci. USA 84:214-218; Nishimura et al. (1987) Canc. Res. 47:999-1005; Wood et al. (1985) Nature 314:446-449; and Shaw et al. (1988) J. Natl. Cancer Inst. 80:1553-1559); Morrison, S. L. (1985) Science 229:1202-1207; Oi et al. (1986) BioTechniques 4:214; Winter U.S. Pat. No. 5,225,539; Jones et al. (1986) Nature 321:552-525; Verhoeyen et al. (1988) Science 239:1534; and Beidler et al. (1988) J. Immunol. 141:4053-4060.

[0207] An anti-TWIK-6 antibody (e.g, monoclonal antibody) can be used to isolate TWIK-6 by standard techniques, such as affinity chromatography or immunoprecipitation. An anti-TWIK-6 antibody can facilitate the purification of natural TWIK-6 from cells and of recombinantly produced TWIK-6 expressed in host cells. Moreover, an anti-TWIK-6 antibody can be used to detect TWIK-6 protein (e.g., in a cellular lysate or cell supernatant) in order to evaluate the abundance and pattern of expression of the TWIK-6 protein. Anti-TWIK-6 antibodies can be used diagnostically to monitor protein levels in tissue as part of a clinical testing procedure, e.g., to, for example, determine the efficacy of a given treatment regimen. Detection can be facilitated by coupling (i.e., physically linking) the antibody to a detectable substance. Examples of detectable substances include various enzymes, prosthetic groups, fluorescent materials, luminescent materials, bioluminescent materials, and radioactive materials. Examples of suitable enzymes include horseradish peroxidase, alkaline phosphatase, β-galactosidase, or acetylcholinesterase; examples of suitable prosthetic group complexes include streptavidin/biotin and avidin/biotin; examples of suitable fluorescent materials include umbelliferone, fluorescein, fluorescein isothiocyanate, rhodamine, dichlorotriazinylamine fluorescein, dansyl chloride or phycoerythrin; an example of a luminescent material includes luminol; examples of bioluminescent materials include luciferase, luciferin, and aequorin, and examples of suitable radioactive material include ¹²⁵I, ¹³¹I, ³⁵S or ³H.

[0208] II. Recombinant Expression Vectors and Host Cells

[0209] Another aspect of the invention pertains to vectors, preferably expression vectors, containing a nucleic acid encoding a TWIK-6 protein (or a portion thereof). As used herein, the term “vector” refers to a nucleic acid molecule capable of transporting another nucleic acid to which it has been linked. One type of vector is a “plasmid”, which refers to a circular double stranded DNA loop into which additional DNA segments can be ligated. Another type of vector is a viral vector, wherein additional DNA segments can be ligated into the viral genome. Certain vectors are capable of autonomous replication in a host cell into which they are introduced (e.g., bacterial vectors having a bacterial origin of replication and episomal mammalian vectors). Other vectors (e.g., non-episomal mammalian vectors) are integrated into the genome of a host cell upon introduction into the host cell, and thereby are replicated along with the host genome. Moreover, certain vectors are capable of directing the expression of genes to which they are operatively linked. Such vectors are referred to herein as “expression vectors”. In general, expression vectors of utility in recombinant DNA techniques are often in the form of plasmids. In the present specification, “plasmid” and “vector” can be used interchangeably as the plasmid is the most commonly used form of vector. However, the invention is intended to include such other forms of expression vectors, such as viral vectors (e.g., replication defective retroviruses, adenoviruses and adeno-associated viruses), which serve equivalent functions.

[0210] The recombinant expression vectors of the invention comprise a nucleic acid of the invention in a form suitable for expression of the nucleic acid in a host cell, which means that the recombinant expression vectors include one or more regulatory sequences, selected on the basis of the host cells to be used for expression, which is operatively linked to the nucleic acid sequence to be expressed. Within a recombinant expression vector, “operably linked” is intended to mean that the nucleotide sequence of interest is linked to the regulatory sequence(s) in a manner which allows for expression of the nucleotide sequence (e.g., in an in vitro transcription/translation system or in a host cell when the vector is introduced into the host cell). The term “regulatory sequence” is intended to include promoters, enhancers and other expression control elements (e.g., polyadenylation signals). Such regulatory sequences are described, for example, in Goeddel; Gene Expression Technology: Methods in Enzymology 185, Academic Press, San Diego, Calif. (1990). Regulatory sequences include those which direct constitutive expression of a nucleotide sequence in many types of host cells and those which direct expression of the nucleotide sequence only in certain host cells (e.g., tissue-specific regulatory sequences). It will be appreciated by those skilled in the art that the design of the expression vector can depend on such factors as the choice of the host cell to be transformed, the level of expression of protein desired, and the like. The expression vectors of the invention can be introduced into host cells to thereby produce proteins or peptides, including fusion proteins or peptides, encoded by nucleic acids as described herein (e.g., TWIK-6 proteins, mutant forms of TWIK-6 proteins, fusion proteins, and the like).

[0211] The recombinant expression vectors of the invention can be designed for expression of TWIK-6 proteins in prokaryotic or eukaryotic cells. For example, TWIK-6 proteins can be expressed in bacterial cells such as E. coli, insect cells (using baculovirus expression vectors) yeast cells or mammalian cells. Suitable host cells are discussed further in Goeddel, Gene Expression Technology: Methods in Enzymology 185, Academic Press, San Diego, Calif. (1990). Alternatively, the recombinant expression vector can be transcribed and translated in vitro, for example using T7 promoter regulatory sequences and T7 polymerase.

[0212] Expression of proteins in prokaryotes is most often carried out in E. coli with vectors containing constitutive or inducible promoters directing the expression of either fusion or non-fusion proteins. Fusion vectors add a number of amino acids to a protein encoded therein, usually to the amino terminus of the recombinant protein. Such fusion vectors typically serve three purposes: 1) to increase expression of recombinant protein; 2) to increase the solubility of the recombinant protein; and 3) to aid in the purification of the recombinant protein by acting as a ligand in affinity purification. Often, in fusion expression vectors, a proteolytic cleavage site is introduced at the junction of the fusion moiety and the recombinant protein to enable separation of the recombinant protein from the fusion moiety subsequent to purification of the fusion protein. Such enzymes, and their cognate recognition sequences, include Factor Xa, thrombin and enterokinase. Typical fusion expression vectors include pGEX (Pharmacia Biotech Inc; Smith, D. B. and Johnson, K. S. (1988) Gene 67:31-40), pMAL (New England Biolabs, Beverly, Mass.) and pRIT5 (Pharmacia, Piscataway, N.J.) which fuse glutathione S-transferase (GST), maltose E binding protein, or protein A, respectively, to the target recombinant protein.

[0213] Purified fusion proteins can be utilized in TWIK-6 activity assays, (e.g., direct assays or competitive assays described in detail below), or to generate antibodies specific for TWIK-6 proteins, for example. In a preferred embodiment, a TWIK-6 fusion protein expressed in a retroviral expression vector of the present invention can be utilized to infect bone marrow cells which are subsequently transplanted into irradiated recipients. The pathology of the subject recipient is then examined after sufficient time has passed (e.g., six (6) weeks).

[0214] Examples of suitable inducible non-fusion E. coli expression vectors include pTrc (Amann et al., (1988) Gene 69:301-315) and pET 11d (Studier et al., Gene Expression Technology: Methods in Enzymology 185, Academic Press, San Diego, Calif. (1990) 60-89). Target gene expression from the pTrc vector relies on host RNA polymerase transcription from a hybrid trp-lac fusion promoter. Target gene expression from the pET 11d vector relies on transcription from a T7 gn10-lac fusion promoter mediated by a coexpressed viral RNA polymerase (T7 gn1). This viral polymerase is supplied by host strains BL21(DE3) or HMS174(DE3) from a resident prophage harboring a T7 gn1 gene under the transcriptional control of the lacUV 5 promoter.

[0215] One strategy to maximize recombinant protein expression in E. coli is to express the protein in a host bacteria with an impaired capacity to proteolytically cleave the recombinant protein (Gottesman, S., Gene Expression Technology: Methods in Enzymology 185, Academic Press, San Diego, Calif. (1990) 119-128). Another strategy is to alter the nucleic acid sequence of the nucleic acid to be inserted into an expression vector so that the individual codons for each amino acid are those preferentially utilized in E. coli (Wada et al., (1992) Nucleic Acids Res. 20:2111-2118). Such alteration of nucleic acid sequences of the invention can be carried out by standard DNA synthesis techniques.

[0216] In another embodiment, the TWIK-6 expression vector is a yeast expression vector. Examples of vectors for expression in yeast S. cerevisiae include pYepSec1 (Baldari, et al., (1987) EMBO J. 6:229-234), pMFa (Kurjan and Herskowitz, (1982) Cell 30:933-943), pJRY88 (Schultz et al., (1987) Gene 54:113-123), pYES2 (Invitrogen Corporation, San Diego, Calif.), and picZ (Invitrogen Corporation, San Diego, Calif.).

[0217] Alternatively, TWIK-6 proteins can be expressed in insect cells using baculovirus expression vectors. Baculovirus vectors available for expression of proteins in cultured insect cells (e.g., Sf 9 cells) include the pAc series (Smith et al. (1983) Mol. Cell Biol. 3:2156-2165) and the pVL series (Lucklow and Summers (1989) Virology 170:31-39).

[0218] In yet another embodiment, a nucleic acid of the invention is expressed in mammalian cells using a mammalian expression vector. Examples of mammalian expression vectors include pCDM8 (Seed, B. (1987) Nature 329:840) and pMT2PC (Kaufman et al. (1987) EMBO J. 6:187-195). When used in mammalian cells, the expression vector's control functions are often provided by viral regulatory elements. For example, commonly used promoters are derived from polyoma, Adenovirus 2, cytomegalovirus and Simian Virus 40. For other suitable expression systems for both prokaryotic and eukaryotic cells see chapters 16 and 17 of Sambrook, J., Fritsh, E. F., and Maniatis, T. Molecular Cloning: A Laboratory Manual. 2nd, ed., Cold Spring Harbor Laboratory, Cold Spring Harbor Laboratory Press, Cold Spring Harbor, N.Y., 1989.

[0219] In another embodiment, the recombinant mammalian expression vector is capable of directing expression of the nucleic acid preferentially in a particular cell type (e.g., tissue-specific regulatory elements are used to express the nucleic acid). Tissue-specific regulatory elements are known in the art. Non-limiting examples of suitable tissue-specific promoters include the albumin promoter (liver-specific; Pinkert et al. (1987) Genes Dev. 1:268-277), lymphoid-specific promoters (Calame and Eaton (1988) Adv. Immunol. 43:235-275), in particular promoters of T cell receptors (Winoto and Baltimore (1989) EMBO J. 8:729-733) and immunoglobulins (Banerji et al. (1983) Cell 33:729-740; Queen and Baltimore (1983) Cell 33:741-748), neuron-specific promoters (e.g., the neurofilament promoter; Byrne and Ruddle (1989) Proc. Natl. Acad. Sci. USA 86:5473-5477), pancreas-specific promoters (Edlund et al. (1985) Science 230:912-916), and mammary gland-specific promoters (e.g., milk whey promoter; U.S. Pat. No. 4,873,316 and European Application Publication No. 264,166). Developmentally-regulated promoters are also encompassed, for example the murine hox promoters (Kessel and Gruss (1990) Science 249:374-379) and the α-fetoprotein promoter (Campes and Tilghman (1989) Genes Dev. 3:537-546).

[0220] The invention further provides a recombinant expression vector comprising a DNA molecule of the invention cloned into the expression vector in an antisense orientation. That is, the DNA molecule is operatively linked to a regulatory sequence in a manner which allows for expression (by transcription of the DNA molecule) of an RNA molecule which is antisense to TWIK-6 mRNA. Regulatory sequences operatively linked to a nucleic acid cloned in the antisense orientation can be chosen which direct the continuous expression of the antisense RNA molecule in a variety of cell types, for instance viral promoters and/or enhancers, or regulatory sequences can be chosen which direct constitutive, tissue specific or cell type specific expression of antisense RNA. The antisense expression vector can be in the form of a recombinant plasmid, phagemid or attenuated virus in which antisense nucleic acids are produced under the control of a high efficiency regulatory region, the activity of which can be determined by the cell type into which the vector is introduced. For a discussion of the regulation of gene expression using antisense genes see Weintraub, H. et al., Antisense RNA as a molecular tool for genetic analysis, Reviews—Trends in Genetics, Vol. 1(1) 1986.

[0221] Another aspect of the invention pertains to host cells into which a TWIK-6 nucleic acid molecule of the invention is introduced, e.g., a TWIK-6 nucleic acid molecule within a recombinant expression vector or a TWIK-6 nucleic acid molecule containing sequences which allow it to homologously recombine into a specific site of the host cell's genome. The terms “host cell” and “recombinant host cell” are used interchangeably herein. It is understood that such terms refer not only to the particular subject cell but to the progeny or potential progeny of such a cell. Because certain modifications may occur in succeeding generations due to either mutation or environmental influences, such progeny may not, in fact, be identical to the parent cell, but are still included within the scope of the term as used herein.

[0222] A host cell can be any prokaryotic or eukaryotic cell. For example, a TWIK-6 protein can be expressed in bacterial cells such as E. coli, insect cells, yeast or mammalian cells (such as Chinese hamster ovary cells (CHO) or COS cells). Other suitable host cells are known to those skilled in the art.

[0223] Vector DNA can be introduced into prokaryotic or eukaryotic cells via conventional transformation or transfection techniques. As used herein, the terms “transformation” and “transfection” are intended to refer to a variety of art-recognized techniques for introducing foreign nucleic acid (e.g., DNA) into a host cell, including calcium phosphate or calcium chloride co-precipitation, DEAE-dextran-mediated transfection, lipofection, or electroporation. Suitable methods for transforming or transfecting host cells can be found in Sambrook, et al. (Molecular Cloning: A Laboratory Manual. 2nd, ed., Cold Spring Harbor Laboratory, Cold Spring Harbor Laboratory Press, Cold Spring Harbor, N.Y., 1989), and other laboratory manuals.

[0224] For stable transfection of mammalian cells, it is known that, depending upon the expression vector and transfection technique used, only a small fraction of cells may integrate the foreign DNA into their genome. In order to identify and select these integrants, a gene that encodes a selectable marker (e.g., resistance to antibiotics) is generally introduced into the host cells along with the gene of interest. Preferred selectable markers include those which confer resistance to drugs, such as G418, hygromycin and methotrexate. Nucleic acid encoding a selectable marker can be introduced into a host cell on the same vector as that encoding a TWIK-6 protein or can be introduced on a separate vector. Cells stably transfected with the introduced nucleic acid can be identified by drug selection (e.g., cells that have incorporated the selectable marker gene will survive, while the other cells die).

[0225] A host cell of the invention, such as a prokaryotic or eukaryotic host cell in culture, can be used to produce (i.e., express) a TWIK-6 protein. Accordingly, the invention further provides methods for producing a TWIK-6 protein using the host cells of the invention. In one embodiment, the method comprises culturing the host cell of the invention (into which a recombinant expression vector encoding a TWIK-6 protein has been introduced) in a suitable medium such that a TWIK-6 protein is produced. In another embodiment, the method further comprises isolating a TWIK-6 protein from the medium or the host cell.

[0226] The host cells of the invention can also be used to produce non-human transgenic animals. For example, in one embodiment, a host cell of the invention is a fertilized oocyte or an embryonic stem cell into which TWIK-6-coding sequences have been introduced. Such host cells can then be used to create non-human transgenic animals in which exogenous TWIK-6 sequences have been introduced into their genome or homologous recombinant animals in which endogenous TWIK-6 sequences have been altered. Such animals are useful for studying the function and/or activity of a TWIK-6 and for identifying and/or evaluating modulators of TWIK-6 activity. As used herein, a “transgenic animal” is a non-human animal, preferably a mammal, more preferably a rodent such as a rat or mouse, in which one or more of the cells of the animal includes a transgene. Other examples of transgenic animals include non-human primates, sheep, dogs, cows, goats, chickens, amphibians, and the like. A transgene is exogenous DNA which is integrated into the genome of a cell from which a transgenic animal develops and which remains in the genome of the mature animal, thereby directing the expression of an encoded gene product in one or more cell types or tissues of the transgenic animal. As used herein, a “homologous recombinant animal” is a non-human animal, preferably a mammal, more preferably a mouse, in which an endogenous TWIK-6 gene has been altered by homologous recombination between the endogenous gene and an exogenous DNA molecule introduced into a cell of the animal, e.g., an embryonic cell of the animal, prior to development of the animal.

[0227] A transgenic animal of the invention can be created by introducing a TWIK-6-encoding nucleic acid into the male pronuclei of a fertilized oocyte, e.g., by microinjection, retroviral infection, and allowing the oocyte to develop in a pseudopregnant female foster animal. The TWIK-6 cDNA sequence of SEQ ID NO:1 or 4 can be introduced as a transgene into the genome of a non-human animal. Alternatively, a nonhuman homologue of a human TWIK-6 gene, such as a mouse or rat TWIK-6 gene, can be used as a transgene. Alternatively, a TWIK-6 gene homologue, such as another TWIK-6 family member, can be isolated based on hybridization to the TWIK-6 cDNA sequences of SEQ ID NO:1 or 3, or SEQ ID NO:4 or 6, or the DNA insert of the plasmid deposited with ATCC as Accession Number ______ (described further in subsection I above) and used as a transgene. Intronic sequences and polyadenylation signals can also be included in the transgene to increase the efficiency of expression of the transgene. A tissue-specific regulatory sequence(s) can be operably linked to a TWIK-6 transgene to direct expression of a TWIK-6 protein to particular cells. Methods for generating transgenic animals via embryo manipulation and microinjection, particularly animals such as mice, have become conventional in the art and are described, for example, in U.S. Pat. Nos. 4,736,866 and 4,870,009, both by Leder et al., U.S. Pat. No. 4,873,191 by Wagner et al. and in Hogan, B., Manipulating the Mouse Embryo, (Cold Spring Harbor Laboratory Press, Cold Spring Harbor, N.Y., 1986). Similar methods are used for production of other transgenic animals. A transgenic founder animal can be identified based upon the presence of a TWIK-6 transgene in its genome and/or expression of TWIK-6 mRNA in tissues or cells of the animals. A transgenic founder animal can then be used to breed additional animals carrying the transgene. Moreover, transgenic animals carrying a transgene encoding a TWIK-6 protein can further be bred to other transgenic animals carrying other transgenes.

[0228] To create a homologous recombinant animal, a vector is prepared which contains at least a portion of a TWIK-6 gene into which a deletion, addition or substitution has been introduced to thereby alter, e.g., functionally disrupt, the TWIK-6 gene. The TWIK-6 gene can be a human gene (e.g., the cDNA of SEQ ID NO:3 or 6), but more preferably, is a non-human homologue of a human TWIK-6 gene (e.g., a cDNA isolated by stringent hybridization with the nucleotide sequence of SEQ ID NO:1 or 4). For example, a mouse TWIK-6 gene can be used to construct a homologous recombination nucleic acid molecule, e.g., a vector, suitable for altering an endogenous TWIK-6 gene in the mouse genome. In a preferred embodiment, the homologous recombination nucleic acid molecule is designed such that, upon homologous recombination, the endogenous TWIK-6 gene is functionally disrupted (i.e., no longer encodes a functional protein; also referred to as a “knock out” vector). Alternatively, the homologous recombination nucleic acid molecule can be designed such that, upon homologous recombination, the endogenous TWIK-6 gene is mutated or otherwise altered but still encodes functional protein (e.g., the upstream regulatory region can be altered to thereby alter the expression of the endogenous TWIK-6 protein). In the homologous recombination nucleic acid molecule, the altered portion of the TWIK-6 gene is flanked at its 5′ and 3′ ends by additional nucleic acid sequence of the TWIK-6 gene to allow for homologous recombination to occur between the exogenous TWIK-6 gene carried by the homologous recombination nucleic acid molecule and an endogenous TWIK-6 gene in a cell, e.g., an embryonic stem cell. The additional flanking TWIK-6 nucleic acid sequence is of sufficient length for successful homologous recombination with the endogenous gene. Typically, several kilobases of flanking DNA (both at the 5′ and 3′ ends) are included in the homologous recombination nucleic acid molecule (see, e.g., Thomas, K. R. and Capecchi, M. R. (1987) Cell 51:503 for a description of homologous recombination vectors). The homologous recombination nucleic acid molecule is introduced into a cell, e.g., an embryonic stem cell line (e.g., by electroporation) and cells in which the introduced TWIK-6 gene has homologously recombined with the endogenous TWIK-6 gene are selected (see e.g., Li, E. et al. (1992) Cell 69:915). The selected cells can then injected into a blastocyst of an animal (e.g., a mouse) to form aggregation chimeras (see e.g., Bradley, A. in Teratocarcinomas and Embryonic Stem Cells: A Practical Approach, E. J. Robertson, ed. (IRL, Oxford, 1987) pp. 113-152). A chimeric embryo can then be implanted into a suitable pseudopregnant female foster animal and the embryo brought to term. Progeny harboring the homologously recombined DNA in their germ cells can be used to breed animals in which all cells of the animal contain the homologously recombined DNA by germline transmission of the transgene. Methods for constructing homologous recombination nucleic acid molecules, e.g., vectors, or homologous recombinant animals are described further in Bradley, A. (1991) Current Opinion in Biotechnology 2:823-829 and in PCT International Publication Nos.: WO 90/11354 by Le Mouellec et al.; WO 91/01140 by Smithies et al.; WO 92/0968 by Zijlstra et al.; and WO 93/04169 by Berns et al.

[0229] In another embodiment, transgenic non-human animals can be produced which contain selected systems which allow for regulated expression of the transgene. One example of such a system is the cre/loxP recombinase system of bacteriophage P1. For a description of the cre/loxP recombinase system, see, e.g., Lakso et al. (1992) Proc. Natl. Acad. Sci. USA 89:6232-6236. Another example of a recombinase system is the FLP recombinase system of Saccharomyces cerevisiae (O'Gorman et al. (1991) Science 251:1351-1355. If a cre/loxP recombinase system is used to regulate expression of the transgene, animals containing transgenes encoding both the Cre recombinase and a selected protein are required. Such animals can be provided through the construction of “double” transgenic animals, e.g., by mating two transgenic animals, one containing a transgene encoding a selected protein and the other containing a transgene encoding a recombinase.

[0230] Clones of the non-human transgenic animals described herein can also be produced according to the methods described in Wilmut, I. et al. (1997) Nature 385:810-813 and PCT International Publication Nos. WO 97/07668 and WO 97/07669. In brief, a cell, e.g., a somatic cell, from the transgenic animal can be isolated and induced to exit the growth cycle and enter G_{O} phase. The quiescent cell can then be fused, e.g., through the use of electrical pulses, to an enucleated oocyte from an animal of the same species from which the quiescent cell is isolated. The reconstructed oocyte is then cultured such that it develops to morula or blastocyte and then transferred to pseudopregnant female foster animal. The offspring borne of this female foster animal will be a clone of the animal from which the cell, e.g., the somatic cell, is isolated.

[0231] IV. Pharmaceutical Compositions

[0232] The TWIK-6 nucleic acid molecules, fragments of TWIK-6 proteins, and anti-TWIK-6 antibodies (also referred to herein as “active compounds”) of the invention can be incorporated into pharmaceutical compositions suitable for administration. Such compositions typically comprise the nucleic acid molecule, protein, or antibody and a pharmaceutically acceptable carrier. As used herein the language “pharmaceutically acceptable carrier” is intended to include any and all solvents, dispersion media, coatings, antibacterial and antifungal agents, isotonic and absorption delaying agents, and the like, compatible with pharmaceutical administration. The use of such media and agents for pharmaceutically active substances is well known in the art. Except insofar as any conventional media or agent is incompatible with the active compound, use thereof in the compositions is contemplated. Supplementary active compounds can also be incorporated into the compositions.

[0233] A pharmaceutical composition of the invention is formulated to be compatible with its intended route of administration. Examples of routes of administration include parenteral, e.g., intravenous, intradermal, subcutaneous, oral (e.g., inhalation), transdermal (topical), transmucosal, and rectal administration. Solutions or suspensions used for parenteral, intradermal, or subcutaneous application can include the following components: a sterile diluent such as water for injection, saline solution, fixed oils, polyethylene glycols, glycerine, propylene glycol or other synthetic solvents; antibacterial agents such as benzyl alcohol or methyl parabens; antioxidants such as ascorbic acid or sodium bisulfite; chelating agents such as ethylenediaminetetraacetic acid; buffers such as acetates, citrates or phosphates and agents for the adjustment of tonicity such as sodium chloride or dextrose. pH can be adjusted with acids or bases, such as hydrochloric acid or sodium hydroxide. The parenteral preparation can be enclosed in ampoules, disposable syringes or multiple dose vials made of glass or plastic.

[0234] Pharmaceutical compositions suitable for injectable use include sterile aqueous solutions (where water soluble) or dispersions and sterile powders for the extemporaneous preparation of sterile injectable solutions or dispersion. For intravenous administration, suitable carriers include physiological saline, bacteriostatic water, Cremophor EL™ (BASF, Parsippany, N.J.) or phosphate buffered saline (PBS). In all cases, the composition must be sterile and should be fluid to the extent that easy syringeability exists. It must be stable under the conditions of manufacture and storage and must be preserved against the contaminating action of microorganisms such as bacteria and fungi. The carrier can be a solvent or dispersion medium containing, for example, water, ethanol, polyol (for example, glycerol, propylene glycol, and liquid polyetheylene glycol, and the like), and suitable mixtures thereof. The proper fluidity can be maintained, for example, by the use of a coating such as lecithin, by the maintenance of the required particle size in the case of dispersion and by the use of surfactants. Prevention of the action of microorganisms can be achieved by various antibacterial and antifungal agents, for example, parabens, chlorobutanol, phenol, ascorbic acid, thimerosal, and the like. In many cases, it will be preferable to include isotonic agents, for example, sugars, polyalcohols such as manitol, sorbitol, sodium chloride in the composition. Prolonged absorption of the injectable compositions can be brought about by including in the composition an agent which delays absorption, for example, aluminum monostearate and gelatin.

[0235] Sterile injectable solutions can be prepared by incorporating the active compound (e.g., a fragment of a TWIK-6 protein or an anti-TWIK-6 antibody) in the required amount in an appropriate solvent with one or a combination of ingredients enumerated above, as required, followed by filtered sterilization. Generally, dispersions are prepared by incorporating the active compound into a sterile vehicle which contains a basic dispersion medium and the required other ingredients from those enumerated above. In the case of sterile powders for the preparation of sterile injectable solutions, the preferred methods of preparation are vacuum drying and freeze-drying which yields a powder of the active ingredient plus any additional desired ingredient from a previously sterile-filtered solution thereof.

[0236] Oral compositions generally include an inert diluent or an edible carrier. They can be enclosed in gelatin capsules or compressed into tablets. For the purpose of oral therapeutic administration, the active compound can be incorporated with excipients and used in the form of tablets, troches, or capsules. oral compositions can also be prepared using a fluid carrier for use as a mouthwash, wherein the compound in the fluid carrier is applied orally and swished and expectorated or swallowed. Pharmaceutically compatible binding agents, and/or adjuvant materials can be included as part of the composition. The tablets, pills, capsules, troches and the like can contain any of the following ingredients, or compounds of a similar nature: a binder such as microcrystalline cellulose, gum tragacanth or gelatin; an excipient such as starch or lactose, a disintegrating agent such as alginic acid, Primogel, or corn starch; a lubricant such as magnesium stearate or Sterotes; a glidant such as colloidal silicon dioxide; a sweetening agent such as sucrose or saccharin; or a flavoring agent such as peppermint, methyl salicylate, or orange flavoring.

[0237] For administration by inhalation, the compounds are delivered in the form of an aerosol spray from pressured container or dispenser which contains a suitable propellant, e.g., a gas such as carbon dioxide, or a nebulizer.

[0238] Systemic administration can also be by transmucosal or transdermal means. For transmucosal or transdermal administration, penetrants appropriate to the barrier to be permeated are used in the formulation. Such penetrants are generally known in the art, and include, for example, for transmucosal administration, detergents, bile salts, and fusidic acid derivatives. Transmucosal administration can be accomplished through the use of nasal sprays or suppositories. For transdermal administration, the active compounds are formulated into ointments, salves, gels, or creams as generally known in the art.

[0239] The compounds can also be prepared in the form of suppositories (e.g., with conventional suppository bases such as cocoa butter and other glycerides) or retention enemas for rectal delivery.

[0240] In one embodiment, the active compounds are prepared with carriers that will protect the compound against rapid elimination from the body, such as a controlled release formulation, including implants and microencapsulated delivery systems. Biodegradable, biocompatible polymers can be used, such as ethylene vinyl acetate, polyanhydrides, polyglycolic acid, collagen, polyorthoesters, and polylactic acid. Methods for preparation of such formulations will be apparent to those skilled in the art. The materials can also be obtained commercially from Alza Corporation and Nova Pharmaceuticals, Inc. Liposomal suspensions (including liposomes targeted to infected cells with monoclonal antibodies to viral antigens) can also be used as pharmaceutically acceptable carriers. These can be prepared according to methods known to those skilled in the art, for example, as described in U.S. Pat. No. 4,522,811.

[0241] It is especially advantageous to formulate oral or parenteral compositions in dosage unit form for ease of administration and uniformity of dosage. Dosage unit form as used herein refers to physically discrete units suited as unitary dosages for the subject to be treated; each unit containing a predetermined quantity of active compound calculated to produce the desired therapeutic effect in association with the required pharmaceutical carrier. The specification for the dosage unit forms of the invention are dictated by and directly dependent on the unique characteristics of the active compound and the particular therapeutic effect to be achieved, and the limitations inherent in the art of compounding such an active compound for the treatment of individuals.

[0242] Toxicity and therapeutic efficacy of such compounds can be determined by standard pharmaceutical procedures in cell cultures or experimental animals, e.g., for determining the LD50 (the dose lethal to 50% of the population) and the ED50 (the dose therapeutically effective in 50% of the population). The dose ratio between toxic and therapeutic effects is the therapeutic index and it can be expressed as the ratio LD50/ED50. Compounds which exhibit large therapeutic indices are preferred. While compounds that exhibit toxic side effects may be used, care should be taken to design a delivery system that targets such compounds to the site of affected tissue in order to minimize potential damage to uninfected cells and, thereby, reduce side effects.

[0243] The data obtained from the cell culture assays and animal studies can be used in formulating a range of dosage for use in humans. The dosage of such compounds lies preferably within a range of circulating concentrations that include the ED50 with little or no toxicity. The dosage may vary within this range depending upon the dosage form employed and the route of administration utilized. For any compound used in the method of the invention, the therapeutically effective dose can be estimated initially from cell culture assays. A dose may be formulated in animal models to achieve a circulating plasma concentration range that includes the IC50 (i.e., the concentration of the test compound which achieves a half-maximal inhibition of symptoms) as determined in cell culture. Such information can be used to more accurately determine useful doses in humans. Levels in plasma may be measured, for example, by high performance liquid chromatography.

[0244] As defined herein, a therapeutically effective amount of protein or polypeptide (i.e., an effective dosage) ranges from about 0.001 to 30 mg/kg body weight, preferably about 0.01 to 25 mg/kg body weight, more preferably about 0.1 to 20 mg/kg body weight, and even more preferably about 1 to 10 mg/kg, 2 to 9 mg/kg, 3 to 8 mg/kg, 4 to 7 mg/kg, or 5 to 6 mg/kg body weight. The skilled artisan will appreciate that certain factors may influence the dosage required to effectively treat a subject, including but not limited to the severity of the disease or disorder, previous treatments, the general health and/or age of the subject, and other diseases present. Moreover, treatment of a subject with a therapeutically effective amount of a protein, polypeptide, or antibody can include a single treatment or, preferably, can include a series of treatments.

[0245] In a preferred example, a subject is treated with antibody, protein, or polypeptide in the range of between about 0.1 to 20 mg/kg body weight, one time per week for between about 1 to 10 weeks, preferably between 2 to 8 weeks, more preferably between about 3 to 7 weeks, and even more preferably for about 4, 5, or 6 weeks. It will also be appreciated that the effective dosage of antibody, protein, or polypeptide used for treatment may increase or decrease over the course of a particular treatment. Changes in dosage may result and become apparent from the results of diagnostic assays as described herein.

[0246] The present invention encompasses agents which modulate expression or activity. An agent may, for example, be a small molecule. For example, such small molecules include, but are not limited to, peptides, peptidomimetics, amino acids, amino acid analogs, polynucleotides, polynucleotide analogs, nucleotides, nucleotide analogs, organic or inorganic compounds (i.e., including heteroorganic and organometallic compounds) having a molecular weight less than about 10,000 grams per mole, organic or inorganic compounds having a molecular weight less than about 5,000 grams per mole, organic or inorganic compounds having a molecular weight less than about 1,000 grams per mole, organic or inorganic compounds having a molecular weight less than about 500 grams per mole, and salts, esters, and other pharmaceutically acceptable forms of such compounds. It is understood that appropriate doses of small molecule agents depends upon a number of factors within the ken of the ordinarily skilled physician, veterinarian, or researcher. The dose(s) of the small molecule will vary, for example, depending upon the identity, size, and condition of the subject or sample being treated, further depending upon the route by which the composition is to be administered, if applicable, and the effect which the practitioner desires the small molecule to have upon the nucleic acid or polypeptide of the invention.

[0247] Exemplary doses include milligram or microgram amounts of the small molecule per kilogram of subject or sample weight (e.g., about 1 microgram per kilogram to about 500 milligrams per kilogram, about 100 micrograms per kilogram to about 5 milligrams per kilogram, or about 1 microgram per kilogram to about 50 micrograms per kilogram. It is furthermore understood that appropriate doses of a small molecule depend upon the potency of the small molecule with respect to the expression or activity to be modulated. Such appropriate doses may be determined using the assays described herein. When one or more of these small molecules is to be administered to an animal (e.g., a human) in order to modulate expression or activity of a polypeptide or nucleic acid of the invention, a physician, veterinarian, or researcher may, for example, prescribe a relatively low dose at first, subsequently increasing the dose until an appropriate response is obtained. In addition, it is understood that the specific dose level for any particular animal subject will depend upon a variety of factors including the activity of the specific compound employed, the age, body weight, general health, gender, and diet of the subject, the time of administration, the route of administration, the rate of excretion, any drug combination, and the degree of expression or activity to be modulated.

[0248] Further, an antibody (or fragment thereof) may be conjugated to a therapeutic moiety such as a cytotoxin, a therapeutic agent or a radioactive metal ion. A cytotoxin or cytotoxic agent includes any agent that is detrimental to cells. Examples include taxol, cytochalasin B, gramicidin D, ethidium bromide, emetine, mitomycin, etoposide, tenoposide, vincristine, vinblastine, colchicin, doxorubicin, daunorubicin, dihydroxy anthracin dione, mitoxantrone, mithramycin, actinomycin D, 1-dehydrotestosterone, glucocorticoids, procaine, tetracaine, lidocaine, propranolol, and puromycin and analogs or homologs thereof. Therapeutic agents include, but are not limited to, antimetabolites (e.g., methotrexate, 6-mercaptopurine, 6-thioguanine, cytarabine, 5-fluorouracil decarbazine), alkylating agents (e.g., mechlorethamine, thioepa chlorambucil, melphalan, carmustine (BSNU) and lomustine (CCNU), cyclothosphamide, busulfan, dibromomannitol, streptozotocin, mitomycin C, and cis-dichlorodiamine platinum (II) (DDP) cisplatin), anthracyclines (e.g., daunorubicin (formerly daunomycin) and doxorubicin), antibiotics (e.g., dactinomycin (formerly actinomycin), bleomycin, mithramycin, and anthramnycin (AMC)), and anti-mitotic agents (e.g., vincristine and vinblastine).

[0249] The conjugates of the invention can be used for modifying a given biological response, the drug moiety is not to be construed as limited to classical chemical therapeutic agents. For example, the drug moiety may be a protein or polypeptide possessing a desired biological activity. Such proteins may include, for example, a toxin such as abrin, ricin A, pseudomonas exotoxin, or diphtheria toxin; a protein such as tumor necrosis factor, alpha-interferon, beta-interferon, nerve growth factor, platelet derived growth factor, tissue plasminogen activator; or, biological response modifiers such as, for example, lymphokines, interleukin-1 (“IL-1”), interleukin-2 (“IL-2”), interleukin-6 (“IL-6”), granulocyte macrophage colony stimulating factor (“GM-CSF”), granulocyte colony stimulating factor (“G-CSF”), or other growth factors.

[0250] Techniques for conjugating such therapeutic moiety to antibodies are well known, see, e.g., Arnon et al., “Monoclonal Antibodies For Immunotargeting Of Drugs In Cancer Therapy”, in Monoclonal Antibodies And Cancer Therapy, Reisfeld et al. (eds.), pp. 243-56 (Alan R. Liss, Inc. 1985); Hellstrom et al., “Antibodies For Drug Delivery”, in Controlled Drug Delivery (2nd Ed.), Robinson et al. (eds.), pp. 623-53 (Marcel Dekker, Inc. 1987); Thorpe, “Antibody Carriers Of Cytotoxic Agents In Cancer Therapy: A Review”, in Monoclonal Antibodies '84: Biological And Clinical Applications, Pinchera et al. (eds.), pp. 475-506 (1985); “Analysis, Results, And Future Prospective Of The Therapeutic Use Of Radiolabeled Antibody In Cancer Therapy”, in Monoclonal Antibodies For Cancer Detection And Therapy, Baldwin et al. (eds.), pp. 303-16 (Academic Press 1985), and Thorpe et al., “The Preparation And Cytotoxic Properties Of Antibody-Toxin Conjugates”, Immunol. Rev., 62:119-58 (1982). Alternatively, an antibody can be conjugated to a second antibody to form an antibody heteroconjugate as described by Segal in U.S. Pat. No. 4,676,980.

[0251] The nucleic acid molecules of the invention can be inserted into vectors and used as gene therapy vectors. Gene therapy vectors can be delivered to a subject by, for example, intravenous injection, local administration (see U.S. Pat. No. 5,328,470) or by stereotactic injection (see e.g., Chen et al. (1994) Proc. Natl. Acad. Sci. USA 91:3054-3057). The pharmaceutical preparation of the gene therapy vector can include the gene therapy vector in an acceptable diluent, or can comprise a slow release matrix in which the gene delivery vehicle is imbedded. Alternatively, where the complete gene delivery vector can be produced intact from recombinant cells, e.g., retroviral vectors, the pharmaceutical preparation can include one or more cells which produce the gene delivery system.

[0252] The pharmaceutical compositions can be included in a container, pack, or dispenser together with instructions for administration.

[0253] V. Uses and Methods of the Invention

[0254] The nucleic acid molecules, proteins, protein homologues, and antibodies described herein can be used in one or more of the following methods: a) screening assays; b) predictive medicine (e.g., diagnostic assays, prognostic assays, monitoring clinical trials, and pharmacogenetics); and c) methods of treatment (e.g., therapeutic and prophylactic). As described herein, a TWIK-6 protein of the invention has one or more of the following activities: (1) interacting with a non-TWIK protein molecule; (2) activating a TWIK-dependent signal transduction pathway; (3) modulating the release of neurotransmitters; (4) modulating membrane excitability; (5) influencing the resting potential of membranes, wave forms and frequencies of action potentials, and thresholds of excitation, and (6) modulating processes which underlie learning and memory, such as integration of sub-threshold synaptic responses and the conductance of back-propagating action potentials.

[0255] The isolated nucleic acid molecules of the invention can be used, for example, to express TWIK-6 protein (e.g., via a recombinant expression vector in a host cell in gene therapy applications), to detect TWIK-6 mRNA (e.g., in a biological sample) or a genetic alteration in a TWIK-6 gene, and to modulate TWIK-6 activity, as described further below. The TWIK-6 proteins can be used to treat disorders characterized by insufficient or excessive production of a TWIK-6 substrate or production of TWIK-6 inhibitors. In addition, the TWIK-6 proteins can be used to screen for naturally occurring TWIK-6 substrates, to screen for drugs or compounds which modulate TWIK-6 activity, as well as to treat disorders characterized by insufficient or excessive production of TWIK-6 protein or production of TWIK-6 protein forms which have decreased, aberrant or unwanted activity compared to TWIK-6 wild type protein (e.g., proliferative disorders, CNS disorders such as cognitive and neurodegenerative disorders (e.g., Alzheimer's disease, dementias related to Alzheimer's disease (such as Pick's disease), Parkinson's and other Lewy diffuse body diseases, senile dementia, Huntington's disease, Gilles de la Tourette's syndrome, multiple sclerosis, amyotrophic lateral sclerosis, progressive supranuclear palsy, epilepsy, and Jakob-Creutzfieldt disease; autonomic function disorders such as hypertension and sleep disorders, and neuropsychiatric disorders, such as depression, schizophrenia, schizoaffective disorder, korsakoff's psychosis, mania, anxiety disorders, or phobic disorders; learning or memory disorders, e.g., amnesia or age-related memory loss, attention deficit disorder, dysthymic disorder, major depressive disorder, mania, obsessive-compulsive disorder, psychoactive substance use disorders, anxiety, phobias, panic disorder, and bipolar affective disorder (e.g., severe bipolar affective (mood) disorder (BP-1) and bipolar affective neurological disorders (e.g., migraine and obesity)); cardiac disorders (e.g., arteriosclerosis, ischemia reperfusion injury, restenosis, arterial inflammation, vascular wall remodeling, ventricular remodeling, rapid ventricular pacing, coronary microembolism, tachycardia, bradycardia, pressure overload, aortic bending, coronary artery ligation, vascular heart disease, atrial fibrilation, Jervell syndrome, Lange-Nielsen syndrome, long-QT syndrome, congestive heart failure, sinus node dysfunction, angina, heart failure, hypertension, atrial fibrillation, atrial flutter, dilated cardiomyopathy, idiopathic cardiomyopathy, myocardial infarction, coronary artery disease, coronary artery spasm, and arrhythmia), muscular disorders (e.g., paralysis, muscle weakness (e.g., ataxia, myotonia, and myokymia), muscular dystrophy (e.g., Duchenne muscular dystrophy or myotonic dystrophy), spinal muscular atrophy, congenital myopathies, central core disease, rod myopathy, central nuclear myopathy, Lambert-Eaton syndrome, denervation, and infantile spinal muscular atrophy (Werdnig-Hoffman disease), and cellular growth, differentiation, or migration disorders (e.g., cancer, e.g., carcinoma, sarcoma, or leukemia; tumor angiogenesis and metastasis; skeletal dysplasia; neuronal deficiencies resulting from impaired neural induction and patterning; hepatic disorders; cardiovascular disorders; and hematopoietic and/or myeloproliferative disorders). Moreover, the anti-TWIK-6 antibodies of the invention can be used to detect and isolate TWIK-6 proteins, regulate the bioavailability of TWIK-6 proteins, and modulate TWIK-6 activity.

[0256] A. Screening Assays:

[0257] The invention provides a method (also referred to herein as a “screening assay”) for identifying modulators, i.e., candidate or test compounds or agents (e.g., peptides, peptidomimetics, small molecules or other drugs) which bind to TWIK-6 proteins, have a stimulatory or inhibitory effect on, for example, TWIK-6 expression or TWIK-6 activity, or have a stimulatory or inhibitory effect on, for example, the expression or activity of TWIK-6 substrate.

[0258] In one embodiment, the invention provides assays for screening candidate or test compounds which are substrates of a TWIK-6 protein or polypeptide or biologically active portion thereof. In another embodiment, the invention provides assays for screening candidate or test compounds which bind to or modulate the activity of a TWIK-6 protein or polypeptide or biologically active portion thereof. The test compounds of the present invention can be obtained using any of the numerous approaches in combinatorial library methods known in the art, including: biological libraries; spatially addressable parallel solid phase or solution phase libraries; synthetic library methods requiring deconvolution; the ‘one-bead one-compound’ library method; and synthetic library methods using affinity chromatography selection. The biological library approach is limited to peptide libraries, while the other four approaches are applicable to peptide, non-peptide oligomer or small molecule libraries of compounds (Lam, K. S. (1997) Anticancer Drug Des. 12:145).

[0259] Examples of methods for the synthesis of molecular libraries can be found in the art, for example in: DeWitt et al. (1993) Proc. Natl. Acad. Sci. U.S.A. 90:6909; Erb et al. (1994) Proc. Natl. Acad. Sci. USA 91:11422; Zuckermann et al. (1994). J. Med. Chem. 37:2678; Cho et al. (1993) Science 261:1303; Carrell et al. (1994) Angew. Chem. Int. Ed. Engl. 33:2059; Carell et al. (1994) Angew. Chem. Int. Ed. Engl. 33:2061; and in Gallop et al. (1994) J. Med. Chem. 37:1233.

[0260] Libraries of compounds may be presented in solution (e.g., Houghten (1992) Biotechniques 13:412-421), or on beads (Lam (1991) Nature 354:82-84), chips (Fodor (1993) Nature 364:555-556), bacteria (Ladner U.S. Pat. No. 5,223,409), spores (Ladner U.S. Pat. No. '409), plasmids (Cull et al. (1992) Proc. Natl. Acad. Sci. USA 89:1865-1869) or on phage (Scott and Smith (1990) Science 249:386-390); (Devlin (1990) Science 249:404-406); (Cwirla et al. (1990) Proc. Natl. Acad. Sci. 87:6378-6382); (Felici (1991) J. Mol. Biol. 222:301-310); (Ladner supra.).

[0261] In one embodiment, an assay is a cell-based assay in which a cell which expresses a TWIK-6 protein or biologically active portion thereof is contacted with a test compound and the ability of the test compound to modulate TWIK-6 activity is determined. Determining the ability of the test compound to modulate TWIK-6 activity can be accomplished by monitoring, for example, the release of a neurotransmitter from a cell which expresses TWIK-6. The cell, for example, can be of mammalian origin, e.g., a neuronal cell or a thymus cell. The ability of the test compound to modulate TWIK-6 binding to a substrate or to bind to TWIK-6 can also be determined. Determining the ability of the test compound to modulate TWIK-6 binding to a substrate can be accomplished, for example, by coupling the TWIK-6 substrate with a radioisotope or enzymatic label such that binding of the TWIK-6 substrate to TWIK-6 can be determined by detecting the labeled TWIK-6 substrate in a complex. Alternatively, TWIK-6 could be coupled with a radioisotope or enzymatic label to monitor the ability of a test compound to modulate TWIK-6 binding to a TWIK-6 substrate in a complex. Determining the ability of the test compound to bind TWIK-6 can be accomplished, for example, by coupling the compound with a radioisotope or enzymatic label such that binding of the compound to TWIK-6 can be determined by detecting the labeled TWIK-6 compound in a complex. For example, compounds (e.g., TWIK-6 substrates) can be labeled with ¹²⁵I, ³⁵S, ¹⁴C, or ³H, either directly or indirectly, and the radioisotope detected by direct counting of radioemission or by scintillation counting. Alternatively, compounds can be enzymatically labeled with, for example, horseradish peroxidase, alkaline phosphatase, or luciferase, and the enzymatic label detected by determination of conversion of an appropriate substrate to product.

[0262] It is also within the scope of this invention to determine the ability of a compound (e.g., a TWIK-6 substrate) to interact with TWIK-6 without the labeling of any of the interactants. For example, a microphysiometer can be used to detect the interaction of a compound with TWIK-6 without the labeling of either the compound or the TWIK-6. McConnell, H. M. et al. (1992) Science 257:1906-1912. As used herein, a “microphysiometer” (e.g., Cytosensor) is an analytical instrument that measures the rate at which a cell acidifies its environment using a light-addressable potentiometric sensor (LAPS). Changes in this acidification rate can be used as an indicator of the interaction between a compound and TWIK-6.

[0263] In another embodiment, an assay is a cell-based assay comprising contacting a cell expressing a TWIK-6 target molecule (e.g., a TWIK-6 substrate) with a test compound and determining the ability of the test compound to modulate (e.g., stimulate or inhibit) the activity of the TWIK-6 target molecule. Determining the ability of the test compound to modulate the activity of a TWIK-6 target molecule can be accomplished, for example, by determining the ability of the TWIK-6 protein to bind to or interact with the TWIK-6 target molecule.

[0264] Determining the ability of the TWIK-6 protein, or a biologically active fragment thereof, to bind to or interact with a TWIK-6 target molecule can be accomplished by one of the methods described above for determining direct binding. In a preferred embodiment, determining the ability of the TWIK-6 protein to bind to or interact with a TWIK-6 target molecule can be accomplished by determining the activity of the target molecule. For example, the activity of the target molecule can be determined by detecting induction of a cellular response (i.e., changes in intracellular K⁺ levels), detecting catalytic/enzymatic activity of the target on an appropriate substrate, detecting the induction of a reporter gene (comprising a target-responsive regulatory element operatively linked to a nucleic acid encoding a detectable marker, e.g., luciferase), or detecting a target-regulated cellular response.

[0265] In yet another embodiment, an assay of the present invention is a cell-free assay in which a TWIK-6 protein or biologically active portion thereof is contacted with a test compound and the ability of the test compound to bind to the TWIK-6 protein or biologically active portion thereof is determined. Preferred biologically active portions of the TWIK-6 proteins to be used in assays of the present invention include fragments which participate in interactions with non-TWIK-6 molecules, e.g., fragments with high surface probability scores (see, for example, FIG. 3). Binding of the test compound to the TWIK-6 protein can be determined either directly or indirectly as described above. In a preferred embodiment, the assay includes contacting the TWIK-6 protein or biologically active portion thereof with a known compound which binds TWIK-6 to form an assay mixture, contacting the assay mixture with a test compound, and determining the ability of the test compound to interact with a TWIK-6 protein, wherein determining the ability of the test compound to interact with a TWIK-6 protein comprises determining the ability of the test compound to preferentially bind to TWIK-6 or biologically active portion thereof as compared to the known compound.

[0266] In another embodiment, the assay is a cell-free assay in which a TWIK-6 protein or biologically active portion thereof is contacted with a test compound and the ability of the test compound to modulate (e.g., stimulate or inhibit) the activity of the TWIK-6 protein or biologically active portion thereof is determined. Determining the ability of the test compound to modulate the activity of a TWIK-6 protein can be accomplished, for example, by determining the ability of the TWIK-6 protein to bind to a TWIK-6 target molecule by one of the methods described above for determining direct binding. Determining the ability of the TWIK-6 protein to bind to a TWIK-6 target molecule can also be accomplished using a technology such as real-time Biomolecular Interaction Analysis (BIA). Sjolander, S. and Urbaniczky, C. (1991) Anal. Chem. 63:2338-2345 and Szabo et al. (1995) Curr. Opin. Struct. Biol. 5:699-705. As used herein, “BIA” is a technology for studying biospecific interactions in real time, without labeling any of the interactants (e.g., BIAcore). Changes in the optical phenomenon of surface plasmon resonance (SPR) can be used as an indication of real-time reactions between biological molecules.

[0267] In an alternative embodiment, determining the ability of the test compound to modulate the activity of a TWIK-6 protein can be accomplished by determining the ability of the TWIK-6 protein to further modulate the activity of a downstream effector of a TWIK-6 target molecule. For example, the activity of the effector molecule on an appropriate target can be determined or the binding of the effector to an appropriate target can be determined as previously described.

[0268] In yet another embodiment, the cell-free assay involves contacting a TWIK-6 protein or biologically active portion thereof with a known compound which binds the TWIK-6 protein to form an assay mixture, contacting the assay mixture with a test compound, and determining the ability of the test compound to interact with the TWIK-6 protein, wherein determining the ability of the test compound to interact with the TWIK-6 protein comprises determining the ability of the TWIK-6protein to preferentially bind to or modulate the activity of a TWIK-6 target molecule.

[0269] In more than one embodiment of the above assay methods of the present invention, it may be desirable to immobilize either TWIK-6 or its target molecule to facilitate separation of complexed from uncomplexed forms of one or both of the proteins, as well as to accommodate automation of the assay. Binding of a test compound to a TWIK-6 protein, or interaction of a TWIK-6 protein with a target molecule in the presence and absence of a candidate compound, can be accomplished in any vessel suitable for containing the reactants. Examples of such vessels include microtitre plates, test tubes, and micro-centrifuge tubes. In one embodiment, a fusion protein can be provided which adds a domain that allows one or both of the proteins to be bound to a matrix. For example, glutathione-S-transferase/TWIK-6 fusion proteins or glutathione-S-transferase/target fusion proteins can be adsorbed onto glutathione sepharose beads (Sigma Chemical, St. Louis, Mo.) or glutathione derivatized microtitre plates, which are then combined with the test compound or the test compound and either the non-adsorbed target protein or TWIK-6 protein, and the mixture incubated under conditions conducive to complex formation (e.g., at physiological conditions for salt and pH). Following incubation, the beads or microtitre plate wells are washed to remove any unbound components, the matrix immobilized in the case of beads, complex determined either directly or indirectly, for example, as described above. Alternatively, the complexes can be dissociated from the matrix, and the level of TWIK-6 binding or activity determined using standard techniques.

[0270] Other techniques for immobilizing proteins on matrices can also be used in the screening assays of the invention. For example, either a TWIK-6 protein or a TWIK-6 target molecule can be immobilized utilizing conjugation of biotin and streptavidin. Biotinylated TWIK-6 protein or target molecules can be prepared from biotin-NHS (N-hydroxy-succinimide) using techniques known in the art (e.g., biotinylation kit, Pierce Chemicals, Rockford, Ill.), and immobilized in the wells of streptavidin-coated 96 well plates (Pierce Chemical). Alternatively, antibodies reactive with TWIK-6 protein or target molecules but which do not interfere with binding of the TWIK-6 protein to its target molecule can be derivatized to the wells of the plate, and unbound target or TWIK-6 protein trapped in the wells by antibody conjugation. Methods for detecting such complexes, in addition to those described above for the GST-immobilized complexes, include immunodetection of complexes using antibodies reactive with the TWIK-6 protein or target molecule, as well as enzyme-linked assays which rely on detecting an enzymatic activity associated with the TWIK-6 protein or target molecule.

[0271] In another embodiment, modulators of TWIK-6 expression are identified in a method wherein a cell is contacted with a candidate compound and the expression of TWIK-6 mRNA or protein in the cell is determined. The level of expression of TWIK-6 mRNA or protein in the presence of the candidate compound is compared to the level of expression of TWIK-6 mRNA or protein in the absence of the candidate compound. The candidate compound can then be identified as a modulator of TWIK-6 expression based on this comparison. For example, when expression of TWIK-6 mRNA or protein is greater (statistically significantly greater) in the presence of the candidate compound than in its absence, the candidate compound is identified as a stimulator of TWIK-6 mRNA or protein expression. Alternatively, when expression of TWIK-6 mRNA or protein is less (statistically significantly less) in the presence of the candidate compound than in its absence, the candidate compound is identified as an inhibitor of TWIK-6 mRNA or protein expression. The level of TWIK-6 mRNA or protein expression in the cells can be determined by methods described herein for detecting TWIK-6 mRNA or protein.

[0272] In yet another aspect of the invention, the TWIK-6 proteins can be used as “bait proteins” in a two-hybrid assay or three-hybrid assay (see, e.g., U.S. Pat. No. 5,283,317; Zervos et al. (1993) Cell 72:223-232; Madura et al. (1993) J. Biol. Chem. 268:12046-12054; Bartel et al. (1993) Biotechniques 14:920-924; Iwabuchi et al. (1993) Oncogene 8:1693-1696; and Brent WO94/10300), to identify other proteins, which bind to or interact with TWIK-6 (“TWIK-6-binding proteins” or “TWIK-6-bp”) and are involved in TWIK-6 activity. Such TWIK-6-binding proteins are also likely to be involved in the propagation of signals by the TWIK-6 proteins or TWIK-6 targets as, for example, downstream elements of a TWIK-6-mediated signaling pathway. Alternatively, such TWIK-6-binding proteins are likely to be TWIK-6 inhibitors.

[0273] The two-hybrid system is based on the modular nature of most transcription factors, which consist of separable DNA-binding and activation domains. Briefly, the assay utilizes two different DNA constructs. In one construct, the gene that codes for a TWIK-6 protein is fused to a gene encoding the DNA binding domain of a known transcription factor (e.g., GAL-4). In the other construct, a DNA sequence, from a library of DNA sequences, that encodes an unidentified protein (“prey” or “sample”) is fused to a gene that codes for the activation domain of the known transcription factor. If the “bait” and the “prey” proteins are able to interact, in vivo, forming a TWIK-6-dependent complex, the DNA-binding and activation domains of the transcription factor are brought into close proximity. This proximity allows transcription of a reporter gene (e.g., LacZ) which is operably linked to a transcriptional regulatory site responsive to the transcription factor. Expression of the reporter gene can be detected and cell colonies containing the functional transcription factor can be isolated and used to obtain the cloned gene which encodes the protein which interacts with the TWIK-6 protein.

[0274] In another aspect, the invention pertains to a combination of two or more of the assays described herein. For example, a modulating agent can be identified using a cell-based or a cell free assay, and the ability of the agent to modulate the activity of a TWIK-6 protein can be confirmed in vivo, e.g., in an animal such as an animal model for cellular transformation and/or tumorigenesis.

[0275] This invention further pertains to novel agents identified by the above-described screening assays. Accordingly, it is within the scope of this invention to further use an agent identified as described herein in an appropriate animal model. For example, an agent identified as described herein (e.g., a TWIK-6 modulating agent, an antisense TWIK-6 nucleic acid molecule, a TWIK-6-specific antibody, or a TWIK-6-binding partner) can be used in an animal model to determine the efficacy, toxicity, or side effects of treatment with such an agent. Alternatively, an agent identified as described herein can be used in an animal model to determine the mechanism of action of such an agent. Furthermore, this invention pertains to uses of novel agents identified by the above-described screening assays for treatments as described herein.

[0276] B. Detection Assays

[0277] Portions or fragments of the cDNA sequences identified herein (and the corresponding complete gene sequences) can be used in numerous ways as polynucleotide reagents. For example, these sequences can be used to: (i) map their respective genes on a chromosome; and, thus, locate gene regions associated with genetic disease; (ii) identify an individual from a minute biological sample (tissue typing); and (iii) aid in forensic identification of a biological sample. These applications are described in the subsections below.

[0278] 1. Chromosome Mapping

[0279] Once the sequence (or a portion of the sequence) of a gene has been isolated, this sequence can be used to map the location of the gene on a chromosome. This process is called chromosome mapping. Accordingly, portions or fragments of the TWIK-6 nucleotide sequences, described herein, can be used to map the location of the TWIK-6 genes on a chromosome. The mapping of the TWIK-6 sequences to chromosomes is an important first step in correlating these sequences with genes associated with disease.

[0280] Briefly, TWIK-6 genes can be mapped to chromosomes by preparing PCR primers (preferably 15-25 bp in length) from the TWIK-6 nucleotide sequences. Computer analysis of the TWIK-6 sequences can be used to predict primers that do not span more than one exon in the genomic DNA, thus complicating the amplification process. These primers can then be used for PCR screening of somatic cell hybrids containing individual human chromosomes. Only those hybrids containing the human gene corresponding to the TWIK-6 sequences will yield an amplified fragment.

[0281] Somatic cell hybrids are prepared by fusing somatic cells from different mammals (e.g., human and mouse cells). As hybrids of human and mouse cells grow and divide, they gradually lose human chromosomes in random order, but retain the mouse chromosomes. By using media in which mouse cells cannot grow, because they lack a particular enzyme, but human cells can, the one human chromosome that contains the gene encoding the needed enzyme, will be retained. By using various media, panels of hybrid cell lines can be established. Each cell line in a panel contains either a single human chromosome or a small number of human chromosomes, and a full set of mouse chromosomes, allowing easy mapping of individual genes to specific human chromosomes. (D'Eustachio P. et al. (1983) Science 220:919-924). Somatic cell hybrids containing only fragments of human chromosomes can also be produced by using human chromosomes with translocations and deletions.

[0282] PCR mapping of somatic cell hybrids is a rapid procedure for assigning a particular sequence to a particular chromosome. Three or more sequences can be assigned per day using a single thermal cycler. Using the TWIK-6 nucleotide sequences to design oligonucleotide primers, sublocalization can be achieved with panels of fragments from specific chromosomes. Other mapping strategies which can similarly be used to map a TWIK-6 sequence to its chromosome include in situ hybridization (described in Fan, Y. et al. (1990) Proc. Natl. Acad. Sci. USA, 87:6223-27), pre-screening with labeled flow-sorted chromosomes, and pre-selection by hybridization to chromosome specific cDNA libraries.

[0283] Fluorescence in situ hybridization (FISH) of a DNA sequence to a metaphase chromosomal spread can further be used to provide a precise chromosomal location in one step. Chromosome spreads can be made using cells whose division has been blocked in metaphase by a chemical such as colcemid that disrupts the mitotic spindle. The chromosomes can be treated briefly with trypsin, and then stained with Giemsa. A pattern of light and dark bands develops on each chromosome, so that the chromosomes can be identified individually. The FISH technique can be used with a DNA sequence as short as 500 or 600 bases. However, clones larger than 1,000 bases have a higher likelihood of binding to a unique chromosomal location with sufficient signal intensity for simple detection. Preferably 1,000 bases, and more preferably 2,000 bases will suffice to get good results at a reasonable amount of time. For a review of this technique, see Verma et al., Human Chromosomes: A Manual of Basic Techniques (Pergamon Press, New York 1988).

[0284] Reagents for chromosome mapping can be used individually to mark a single chromosome or a single site on that chromosome, or panels of reagents can be used for marking multiple sites and/or multiple chromosomes. Reagents corresponding to noncoding regions of the genes actually are preferred for mapping purposes. Coding sequences are more likely to be conserved within gene families, thus increasing the chance of cross hybridizations during chromosomal mapping.

[0285] Once a sequence has been mapped to a precise chromosomal location, the physical position of the sequence on the chromosome can be correlated with genetic map data. (Such data are found, for example, in V. McKusick, Mendelian Inheritance in Man, available on-line through Johns Hopkins University Welch Medical Library). The relationship between a gene and a disease, mapped to the same chromosomal region, can then be identified through linkage analysis (co-inheritance of physically adjacent genes), described in, for example, Egeland, J. et al. (1987) Nature, 325:783-787.

[0286] Moreover, differences in the DNA sequences between individuals affected and unaffected with a disease associated with the TWIK-6 gene can be determined. If a mutation is observed in some or all of the affected individuals but not in any unaffected individuals, then the mutation is likely to be the causative agent of the particular disease. Comparison of affected and unaffected individuals generally involves first looking for structural alterations in the chromosomes, such as deletions or translocations that are visible from chromosome spreads or detectable using PCR based on that DNA sequence. Ultimately, complete sequencing of genes from several individuals can be performed to confirm the presence of a mutation and to distinguish mutations from polymorphisms.

[0287] 2. Tissue Typing

[0288] The TWIK-6 sequences of the present invention can also be used to identify individuals from minute biological samples. The United States military, for example, is considering the use of restriction fragment length polymorphism (RFLP) for identification of its personnel. In this technique, an individual's genomic DNA is digested with one or more restriction enzymes, and probed on a Southern blot to yield unique bands for identification. This method does not suffer from the current limitations of “Dog Tags” which can be lost, switched, or stolen, making positive identification difficult. The sequences of the present invention are useful as additional DNA markers for RFLP (described in U.S. Pat. No. 5,272,057).

[0289] Furthermore, the sequences of the present invention can be used to provide an alternative technique which determines the actual base-by-base DNA sequence of selected portions of an individual's genome. Thus, the TWIK-6 nucleotide sequences described herein can be used to prepare two PCR primers from the 5′ and 3′ ends of the sequences. These primers can then be used to amplify an individual's DNA and subsequently sequence it.

[0290] Panels of corresponding DNA sequences from individuals, prepared in this manner, can provide unique individual identifications, as each individual will have a unique set of such DNA sequences due to allelic differences. The sequences of the present invention can be used to obtain such identification sequences from individuals and from tissue. The TWIK-6 nucleotide sequences of the invention uniquely represent portions of the human genome. Allelic variation occurs to some degree in the coding regions of these sequences, and to a greater degree in the noncoding regions. It is estimated that allelic variation between individual humans occurs with a frequency of about once per each 500 bases. Each of the sequences described herein can, to some degree, be used as a standard against which DNA from an individual can be compared for identification purposes. Because greater numbers of polymorphisms occur in the noncoding regions, fewer sequences are necessary to differentiate individuals. The noncoding sequences of SEQ ID NO:1 or 4 can comfortably provide positive individual identification with a panel of perhaps 10 to 1,000 primers which each yield a noncoding amplified sequence of 100 bases. If predicted coding sequences, such as those in SEQ ID NO:3 or 6 are used, a more appropriate number of primers for positive individual identification would be 500-2,000.

[0291] If a panel of reagents from TWIK-6 nucleotide sequences described herein is used to generate a unique identification database for an individual, those same reagents can later be used to identify tissue from that individual. Using the unique identification database, positive identification of the individual, living or dead, can be made from extremely small tissue samples.

[0292] 3. Use of TWIK-6 Sequences in Forensic Biology

[0293] DNA-based identification techniques can also be used in forensic biology. Forensic biology is a scientific field employing genetic typing of biological evidence found at a crime scene as a means for positively identifying, for example, a perpetrator of a crime. To make such an identification, PCR technology can be used to amplify DNA sequences taken from very small biological samples such as tissues, e.g., hair or skin, or body fluids, e.g., blood, saliva, or semen found at a crime scene. The amplified sequence can then be compared to a standard, thereby allowing identification of the origin of the biological sample.

[0294] The sequences of the present invention can be used to provide polynucleotide reagents, e.g., PCR primers, targeted to specific loci in the human genome, which can enhance the reliability of DNA-based forensic identifications by, for example, providing another “identification marker” (i.e. another DNA sequence that is unique to a particular individual). As mentioned above, actual base sequence information can be used for identification as an accurate alternative to patterns formed by restriction enzyme generated fragments. Sequences targeted to noncoding regions of SEQ ID NO:1 or 4 are particularly appropriate for this use as greater numbers of polymorphisms occur in the noncoding regions, making it easier to differentiate individuals using this technique. Examples of polynucleotide reagents include the TWIK-6 nucleotide sequences or portions thereof, e.g., fragments derived from the noncoding regions of SEQ ID NO:1 or 4 having a length of at least 20 bases, preferably at least 30 bases.

[0295] The TWIK-6 nucleotide sequences described herein can further be used to provide polynucleotide reagents, e.g., labeled or labelable probes which can be used in, for example, an in situ hybridization technique, to identify a specific tissue, e.g., thymus or brain tissue. This can be very useful in cases where a forensic pathologist is presented with a tissue of unknown origin. Panels of such TWIK-6 probes can be used to identify tissue by species and/or by organ type.

[0296] In a similar fashion, these reagents, e.g., TWIK-6 primers or probes can be used to screen tissue culture for contamination (i.e. screen for the presence of a mixture of different types of cells in a culture).

[0297] C. Predictive Medicine:

[0298] The present invention also pertains to the field of predictive medicine in which diagnostic assays, prognostic assays, and monitoring clinical trials are used for prognostic (predictive) purposes to thereby treat an individual prophylactically. Accordingly, one aspect of the present invention relates to diagnostic assays for determining TWIK-6 protein and/or nucleic acid expression as well as TWIK-6 activity, in the context of a biological sample (e.g., blood, serum, cells, tissue) to thereby determine whether an individual is afflicted with a disease or disorder, or is at risk of developing a disorder, associated with aberrant or unwanted TWIK-6 expression or activity. The invention also provides for prognostic (or predictive) assays for determining whether an individual is at risk of developing a disorder associated with TWIK-6 protein, nucleic acid expression or activity. For example, mutations in a TWIK-6 gene can be assayed in a biological sample. Such assays can be used for prognostic or predictive purpose to thereby prophylactically treat an individual prior to the onset of a disorder characterized by or associated with TWIK-6 protein, nucleic acid expression or activity.

[0299] Another aspect of the invention pertains to monitoring the influence of agents (e.g., drugs, compounds) on the expression or activity of TWIK-6 in clinical trials.

[0300] These and other agents are described in further detail in the following sections.

[0301] 1. Diagnostic Assays

[0302] An exemplary method for detecting the presence or absence of TWIK-6 protein or nucleic acid in a biological sample involves obtaining a biological sample from a test subject and contacting the biological sample with a compound or an agent capable of detecting TWIK-6 protein or nucleic acid (e.g., mRNA, or genomic DNA) that encodes TWIK-6 protein such that the presence of TWIK-6 protein or nucleic acid is detected in the biological sample. A preferred agent for detecting TWIK-6 mRNA or genomic DNA is a labeled nucleic acid probe capable of hybridizing to TWIK-6 mRNA or genomic DNA. The nucleic acid probe can be, for example, the TWIK-6 nucleic acid set forth in SEQ ID NO:1 or 3, or SEQ ID NO:4 or 6, or the DNA insert of the plasmid deposited with ATCC as Accession Number ______, or a portion thereof, such as an oligonucleotide of at least 15, 30, 50, 100, 250 or 500 nucleotides in length and sufficient to specifically hybridize under stringent conditions to TWIK-6 mRNA or genomic DNA. Other suitable probes for use in the diagnostic assays of the invention are described herein.

[0303] A preferred agent for detecting TWIK-6 protein is an antibody capable of binding to TWIK-6 protein, preferably an antibody with a detectable label. Antibodies can be polyclonal, or more preferably, monoclonal. An intact antibody, or a fragment thereof (e.g., Fab or F(ab′)₂) can be used. The term “labeled”, with regard to the probe or antibody, is intended to encompass direct labeling of the probe or antibody by coupling (i.e., physically linking) a detectable substance to the probe or antibody, as well as indirect labeling of the probe or antibody by reactivity with another reagent that is directly labeled. Examples of indirect labeling include detection of a primary antibody using a fluorescently labeled secondary antibody and end-labeling of a DNA probe with biotin such that it can be detected with fluorescently labeled streptavidin. The term “biological sample” is intended to include tissues, cells and biological fluids isolated from a subject, as well as tissues, cells and fluids present within a subject. That is, the detection method of the invention can be used to detect TWIK-6 mRNA, protein, or genomic DNA in a biological sample in vitro as well as in vivo. For example, in vitro techniques for detection of TWIK-6 mRNA include Northern hybridizations and in situ hybridizations. In vitro techniques for detection of TWIK-6 protein include enzyme linked immunosorbent assays (ELISAs), Western blots, immunoprecipitations and immunofluorescence. In vitro techniques for detection of TWIK-6 genomic DNA include Southern hybridizations. Furthermore, in vivo techniques for detection of TWIK-6 protein include introducing into a subject a labeled anti-TWIK-6 antibody. For example, the antibody can be labeled with a radioactive marker whose presence and location in a subject can be detected by standard imaging techniques.

[0304] In one embodiment, the biological sample contains protein molecules from the test subject. Alternatively, the biological sample can contain mRNA molecules from the test subject or genomic DNA molecules from the test subject. A preferred biological sample is a serum sample isolated by conventional means from a subject.

[0305] In another embodiment, the methods further involve obtaining a control biological sample from a control subject, contacting the control sample with a compound or agent capable of detecting TWIK-6 protein, mRNA, or genomic DNA, such that the presence of TWIK-6 protein, mRNA or genomic DNA is detected in the biological sample, and comparing the presence of TWIK-6 protein, mRNA or genomic DNA in the control sample with the presence of TWIK-6 protein, mRNA or genomic DNA in the test sample.

[0306] The invention also encompasses kits for detecting the presence of TWIK-6 in a biological sample. For example, the kit can comprise a labeled compound or agent capable of detecting TWIK-6 protein or mRNA in a biological sample; means for determining the amount of TWIK-6 in the sample; and means for comparing the amount of TWIK-6 in the sample with a standard. The compound or agent can be packaged in a suitable container. The kit can further comprise instructions for using the kit to detect TWIK-6 protein or nucleic acid.

[0307] 2. Prognostic Assays

[0308] The diagnostic methods described herein can furthermore be utilized to identify subjects having or at risk of developing a disease or disorder associated with aberrant or unwanted TWIK-6 expression or activity. As used herein, the term “aberrant” includes a TWIK-6 expression or activity which deviates from the wild type TWIK-6 expression or activity. Aberrant expression or activity includes increased or decreased expression or activity, as well as expression or activity which does not follow the wild type developmental pattern of expression or the subcellular pattern of expression. For example, aberrant TWIK-6 expression or activity is intended to include the cases in which a mutation in the TWIK-6 gene causes the TWIK-6 gene to be under-expressed or over-expressed and situations in which such mutations result in a non-functional TWIK-6 protein or a protein which does not function in a wild-type fashion, e.g., a protein which does not interact with a TWIK-6 substrate, e.g., a non-potassium channel subunit or ligand, or one which interacts with a non-TWIK-6 substrate, e.g. a non-potassium channel subunit or ligand. As used herein, the term “unwanted” includes an unwanted phenomenon involved in a biological response such as cellular proliferation. For example, the term unwanted includes a TWIK-6 expression or activity which is undesirable in a subject.

[0309] The assays described herein, such as the preceding diagnostic assays or the following assays, can be utilized to identify a subject having or at risk of developing a disorder associated with a misregulation in TWIK-6 protein activity or nucleic acid expression, such as a CNS disorder (e.g., a cognitive or neurodegenerative disorder), a cellular proliferation, growth, differentiation, or migration disorder, or a cardiovascular disorder. Alternatively, the prognostic assays can be utilized to identify a subject having or at risk for developing a disorder associated with a misregulation in TWIK-6 protein activity or nucleic acid expression, such as a CNS disorder, a cellular proliferation, growth, differentiation, or migration disorder, or a cardiovascular disorder. Thus, the present invention provides a method for identifying a disease or disorder associated with aberrant or unwanted TWIK-6 expression or activity in which a test sample is obtained from a subject and TWIK-6 protein or nucleic acid (e.g., mRNA or genomic DNA) is detected, wherein the presence of TWIK-6 protein or nucleic acid is diagnostic for a subject having or at risk of developing a disease or disorder associated with aberrant or unwanted TWIK-6 expression or activity. As used herein, a “test sample” refers to a biological sample obtained from a subject of interest. For example, a test sample can be a biological fluid (e.g., cerebrospinal fluid or serum), cell sample, or tissue.

[0310] Furthermore, the prognostic assays described herein can be used to determine whether a subject can be administered an agent (e.g., an agonist, antagonist, peptidomimetic, protein, peptide, nucleic acid, small molecule, or other drug candidate) to treat a disease or disorder associated with aberrant or unwanted TWIK-6 expression or activity. For example, such methods can be used to determine whether a subject can be effectively treated with an agent for a CNS disorder, a muscular disorder, or a cellular proliferation, growth, differentiation, or migration disorder. Thus, the present invention provides methods for determining whether a subject can be effectively treated with an agent for a disorder associated with aberrant or unwanted TWIK-6 expression or activity in which a test sample is obtained and TWIK-6 protein or nucleic acid expression or activity is detected (e.g., wherein the abundance of TWIK-6 protein or nucleic acid expression or activity is diagnostic for a subject that can be administered the agent to treat a disorder associated with aberrant or unwanted TWIK-6 expression or activity).

[0311] The methods of the invention can also be used to detect genetic alterations in a TWIK-6 gene, thereby determining if a subject with the altered gene is at risk for a disorder characterized by misregulation in TWIK-6 protein activity or nucleic acid expression, such as a CNS disorder, a cellular proliferation, growth, differentiation, or migration disorder, or cardiovascular disorder. In preferred embodiments, the methods include detecting, in a sample of cells from the subject, the presence or absence of a genetic alteration characterized by at least one of an alteration affecting the integrity of a gene encoding a TWIK-6-protein, or the mis-expression of the TWIK-6 gene. For example, such genetic alterations can be detected by ascertaining the existence of at least one of 1) a deletion of one or more nucleotides from a TWIK-6 gene; 2) an addition of one or more nucleotides to a TWIK-6 gene; 3) a substitution of one or more nucleotides of a TWIK-6 gene, 4) a chromosomal rearrangement of a TWIK-6 gene; 5) an alteration in the level of a messenger RNA transcript of a TWIK-6 gene, 6) aberrant modification of a TWIK-6 gene, such as of the methylation pattern of the genomic DNA, 7) the presence of a non-wild type splicing pattern of a messenger RNA transcript of a TWIK-6 gene, 8) a non-wild type level of a TWIK-6-protein, 9) allelic loss of a TWIK-6 gene, and 10) inappropriate post-translational modification of a TWIK-6-protein. As described herein, there are a large number of assays known in the art which can be used for detecting alterations in a TWIK-6 gene. A preferred biological sample is a tissue or serum sample isolated by conventional means from a subject.

[0312] In certain embodiments, detection of the alteration involves the use of a probe/primer in a polymerase chain reaction (PCR) (see, e.g., U.S. Pat. Nos. 4,683,195 and 4,683,202), such as anchor PCR or RACE PCR, or, alternatively, in a ligation chain reaction (LCR) (see, e.g., Landegran et al. (1988) Science 241:1077-1080; and Nakazawa et al. (1994) Proc. Natl. Acad. Sci. USA 91:360-364), the latter of which can be particularly useful for detecting point mutations in the TWIK-6-gene (see Abravaya et al. (1995) Nucleic Acids Res. 23:675-682). This method can include the steps of collecting a sample of cells from a subject, isolating nucleic acid (e.g., genomic, mRNA or both) from the cells of the sample, contacting the nucleic acid sample with one or more primers which specifically hybridize to a TWIK-6 gene under conditions such that hybridization and amplification of the TWIK-6-gene (if present) occurs, and detecting the presence or absence of an amplification product, or detecting the size of the amplification product and comparing the length to a control sample. It is anticipated that PCR and/or LCR may be desirable to use as a preliminary amplification step in conjunction with any of the techniques used for detecting mutations described herein.

[0313] Alternative amplification methods include: self sustained sequence replication (Guatelli, J. C. et al., (1990) Proc. Natl. Acad. Sci. USA 87:1874-1878), transcriptional amplification system (Kwoh, D. Y. et al., (1989) Proc. Natl. Acad. Sci. USA 86:1173-1177), Q-Beta Replicase (Lizardi, P.M. et al. (1988) Bio-Technology 6:1197), or any other nucleic acid amplification method, followed by the detection of the amplified molecules using techniques well known to those of skill in the art. These detection schemes are especially useful for the detection of nucleic acid molecules if such molecules are present in very low numbers.

[0314] In an alternative embodiment, mutations in a TWIK-6 gene from a sample cell can be identified by alterations in restriction enzyme cleavage patterns. For example, sample and control DNA is isolated, amplified (optionally), digested with one or more restriction endonucleases, and fragment length sizes are determined by gel electrophoresis and compared. Differences in fragment length sizes between sample and control DNA indicates mutations in the sample DNA. Moreover, the use of sequence specific ribozymes (see, for example, U.S. Pat. No. 5,498,531) can be used to score for the presence of specific mutations by development or loss of a ribozyme cleavage site.

[0315] In other embodiments, genetic mutations in TWIK-6 can be identified by hybridizing a sample and control nucleic acids, e.g., DNA or RNA, to high density arrays containing hundreds or thousands of oligonucleotides probes (Cronin, M. T. et al. (1996) Human Mutation 7: 244-255; Kozal, M. J. et al. (1996) Nature Medicine 2: 753-759). For example, genetic mutations in TWIK-6 can be identified in two dimensional arrays containing light-generated DNA probes as described in Cronin, M. T. et al. supra. Briefly, a first hybridization array of probes can be used to scan through long stretches of DNA in a sample and control to identify base changes between the sequences by making linear arrays of sequential overlapping probes. This step allows the identification of point mutations. This step is followed by a second hybridization array that allows the characterization of specific mutations by using smaller, specialized probe arrays complementary to all variants or mutations detected. Each mutation array is composed of parallel probe sets, one complementary to the wild-type gene and the other complementary to the mutant gene.

[0316] In yet another embodiment, any of a variety of sequencing reactions known in the art can be used to directly sequence the TWIK-6 gene and detect mutations by comparing the sequence of the sample TWIK-6 with the corresponding wild-type (control) sequence. Examples of sequencing reactions include those based on techniques developed by Maxam and Gilbert ((1977) Proc. Natl. Acad. Sci. USA 74:560) or Sanger ((1977) Proc. Natl. Acad. Sci. USA 74:5463). It is also contemplated that any of a variety of automated sequencing procedures can be utilized when performing the diagnostic assays ((1995) Biotechniques 19:448), including sequencing by mass spectrometry (see, e.g, PCT International Publication No. WO 94/16101; Cohen et al. (1996) Adv. Chromatogr. 36:127-162; and Griffin et al. (1993) Appl. Biochem. Biotechnol. 38:147-159).

[0317] Other methods for detecting mutations in the TWIK-6 gene include methods in which protection from cleavage agents is used to detect mismatched bases in RNA/RNA or RNA/DNA heteroduplexes (Myers et al. (1985) Science 230:1242). In general, the art technique of “mismatch cleavage” starts by providing heteroduplexes of formed by hybridizing (labeled) RNA or DNA containing the wild-type TWIK-6 sequence with potentially mutant RNA or DNA obtained from a tissue sample. The double-stranded duplexes are treated with an agent which cleaves single-stranded regions of the duplex such as which will exist due to basepair mismatches between the control and sample strands. For instance, RNA/DNA duplexes can be treated with RNase and DNA/DNA hybrids treated with S1 nuclease to enzymatically digesting the mismatched regions. In other embodiments, either DNA/DNA or RNA/DNA duplexes can be treated with hydroxylamine or osmium tetroxide and with piperidine in order to digest mismatched regions. After digestion of the mismatched regions, the resulting material is then separated by size on denaturing polyacrylamide gels to determine the site of mutation. See, for example, Cotton et al. (1988) Proc. Natl. Acad. Sci. USA 85:4397; Saleeba et al. (1992) Methods Enzymol. 217:286-295. In a preferred embodiment, the control DNA or RNA can be labeled for detection.

[0318] In still another embodiment, the mismatch cleavage reaction employs one or more proteins that recognize mismatched base pairs in double-stranded DNA (so called “DNA mismatch repair” enzymes) in defined systems for detecting and mapping point mutations in TWIK-6 cDNAs obtained from samples of cells. For example, the mutY enzyme of E. coli cleaves A at G/A mismatches and the thymidine DNA glycosylase from HeLa cells cleaves T at G/T mismatches (Hsu et al. (1994) Carcinogenesis 15:1657-1662). According to an exemplary embodiment, a probe based on a TWIK-6 sequence, e.g., a wild-type TWIK-6 sequence, is hybridized to a cDNA or other DNA product from a test cell(s). The duplex is treated with a DNA mismatch repair enzyme, and the cleavage products, if any, can be detected from electrophoresis protocols or the like. See, for example, U.S. Pat. No. 5,459,039.

[0319] In other embodiments, alterations in electrophoretic mobility will be used to identify mutations in TWIK-6 genes. For example, single strand conformation polymorphism (SSCP) may be used to detect differences in electrophoretic mobility between mutant and wild type nucleic acids (Orita et al. (1989) Proc Natl. Acad. Sci USA: 86:2766, see also Cotton (1993) Mutat. Res. 285:125-144; and Hayashi (1992) Genet. Anal. Tech. Appl. 9:73-79). Single-stranded DNA fragments of sample and control TWIK-6 nucleic acids will be denatured and allowed to renature. The secondary structure of single-stranded nucleic acids varies according to sequence, the resulting alteration in electrophoretic mobility enables the detection of even a single base change. The DNA fragments may be labeled or detected with labeled probes. The sensitivity of the assay may be enhanced by using RNA (rather than DNA), in which the secondary structure is more sensitive to a change in sequence. In a preferred embodiment, the subject method utilizes heteroduplex analysis to separate double stranded heteroduplex molecules on the basis of changes in electrophoretic mobility (Keen et al. (1991) Trends Genet 7:5).

[0320] In yet another embodiment the movement of mutant or wild-type fragments in polyacrylamide gels containing a gradient of denaturant is assayed using denaturing gradient gel electrophoresis (DGGE) (Myers et al. (1985) Nature 313:495). When DGGE is used as the method of analysis, DNA will be modified to insure that it does not completely denature, for example by adding a GC clamp of approximately 40 bp of high-melting GC-rich DNA by PCR. In a further embodiment, a temperature gradient is used in place of a denaturing gradient to identify differences in the mobility of control and sample DNA (Rosenbaum and Reissner (1987) Biophys Chem 265:12753).

[0321] Examples of other techniques for detecting point mutations include, but are not limited to, selective oligonucleotide hybridization, selective amplification, or selective primer extension. For example, oligonucleotide primers may be prepared in which the known mutation is placed centrally and then hybridized to target DNA under conditions which permit hybridization only if a perfect match is found (Saiki et al. (1986) Nature 324:163); Saiki et al. (1989) Proc. Natl. Acad. Sci. USA 86:6230). Such allele specific oligonucleotides are hybridized to PCR amplified target DNA or a number of different mutations when the oligonucleotides are attached to the hybridizing membrane and hybridized with labeled target DNA.

[0322] Alternatively, allele specific amplification technology which depends on selective PCR amplification may be used in conjunction with the instant invention. Oligonucleotides used as primers for specific amplification may carry the mutation of interest in the center of the molecule (so that amplification depends on differential hybridization) (Gibbs et al. (1989) Nucleic Acids Res. 17:2437-2448) or at the extreme 3′ end of one primer where, under appropriate conditions, mismatch can prevent, or reduce polymerase extension (Prossner (1993) Tibtech 11:238). In addition it may be desirable to introduce a novel restriction site in the region of the mutation to create cleavage-based detection (Gasparini et al. (1992) Mol. Cell Probes 6:1). It is anticipated that in certain embodiments amplification may also be performed using Taq ligase for amplification (Barany (1991) Proc. Natl. Acad. Sci USA 88:189). In such cases, ligation will occur only if there is a perfect match at the 3′ end of the 5′ sequence making it possible to detect the presence of a known mutation at a specific site by looking for the presence or absence of amplification.

[0323] The methods described herein may be performed, for example, by utilizing pre-packaged diagnostic kits comprising at least one probe nucleic acid or antibody reagent described herein, which may be conveniently used, e.g., in clinical settings to diagnose patients exhibiting symptoms or family history of a disease or illness involving a TWIK-6 gene.

[0324] Furthermore, any cell type or tissue in which TWIK-6 is expressed may be utilized in the prognostic assays described herein.

[0325] 3. Monitoring of Effects During Clinical Trials

[0326] Monitoring the influence of agents (e.g., drugs) on the expression or activity of a TWIK-6 protein (e.g., the modulation of cell proliferation and/or migration) can be applied not only in basic drug screening, but also in clinical trials. For example, the effectiveness of an agent determined by a screening assay as described herein to increase TWIK-6 gene expression, protein levels, or upregulate TWIK-6 activity, can be monitored in clinical trials of subjects exhibiting decreased TWIK-6 gene expression, protein levels, or downregulated TWIK-6 activity. Alternatively, the effectiveness of an agent determined by a screening assay to decrease TWIK-6 gene expression, protein levels, or downregulate TWIK-6 activity, can be monitored in clinical trials of subjects exhibiting increased TWIK-6 gene expression, protein levels, or upregulated TWIK-6 activity. In such clinical trials, the expression or activity of a TWIK-6 gene, and preferably, other genes that have been implicated in, for example, a TWIK-6-associated disorder can be used as a “read out” or markers of the phenotype of a particular cell.

[0327] For example, and not by way of limitation, genes, including TWIK-6, that are modulated in cells by treatment with an agent (e.g., compound, drug or small molecule) which modulates TWIK-6 activity (e.g., identified in a screening assay as described herein) can be identified. Thus, to study the effect of agents on TWIK-6-associated disorders (e.g., disorders characterized by deregulated cell proliferation and/or migration), for example, in a clinical trial, cells can be isolated and RNA prepared and analyzed for the levels of expression of TWIK-6 and other genes implicated in the TWIK-6-associated disorder, respectively. The levels of gene expression (e.g., a gene expression pattern) can be quantified by northern blot analysis or RT-PCR, as described herein, or alternatively by measuring the amount of protein produced, by one of the methods as described herein, or by measuring the levels of activity of TWIK-6 or other genes. In this way, the gene expression pattern can serve as a marker, indicative of the physiological response of the cells to the agent. Accordingly, this response state may be determined before, and at various points during treatment of the individual with the agent.

[0328] In a preferred embodiment, the present invention provides a method for monitoring the effectiveness of treatment of a subject with an agent (e.g., an agonist, antagonist, peptidomimetic, protein, peptide, nucleic acid, small molecule, or other drug candidate identified by the screening assays described herein) including the steps of (i) obtaining a pre-administration sample from a subject prior to administration of the agent; (ii) detecting the level of expression of a TWIK-6 protein, mRNA, or genomic DNA in the preadministration sample; (iii) obtaining one or more post-administration samples from the subject; (iv) detecting the level of expression or activity of the TWIK-6 protein, mRNA, or genomic DNA in the post-administration samples; (v) comparing the level of expression or activity of the TWIK-6 protein, mRNA, or genomic DNA in the pre-administration sample with the TWIK-6 protein, mRNA, or genomic DNA in the post administration sample or samples; and (vi) altering the administration of the agent to the subject accordingly. For example, increased administration of the agent may be desirable to increase the expression or activity of TWIK-6 to higher levels than detected, i.e., to increase the effectiveness of the agent. Alternatively, decreased administration of the agent may be desirable to decrease expression or activity of TWIK-6 to lower levels than detected, i.e. to decrease the effectiveness of the agent. According to such an embodiment, TWIK-6 expression or activity may be used as an indicator of the effectiveness of an agent, even in the absence of an observable phenotypic response.

[0329] D. Methods of Treatment:

[0330] The present invention provides for both prophylactic and therapeutic methods of treating a subject at risk of (or susceptible to) a disorder or having a disorder associated with aberrant or unwanted TWIK-6 expression or activity, e.g. a CNS disorder, a cellular proliferation, growth, differentiation, or migration disorder, or a cardiovascular disorder. With regards to both prophylactic and therapeutic methods of treatment, such treatments may be specifically tailored or modified, based on knowledge obtained from the field of pharmacogenomics. “Pharmacogenomics”, as used herein, refers to the application of genomics technologies such as gene sequencing, statistical genetics, and gene expression analysis to drugs in clinical development and on the market. More specifically, the term refers the study of how a patient's genes determine his or her response to a drug (e.g., a patient's “drug response phenotype”, or “drug response genotype”). Thus, another aspect of the invention provides methods for tailoring an individual's prophylactic or therapeutic treatment with either the TWIK-6 molecules of the present invention or TWIK-6 modulators according to that individual's drug response genotype. Pharmacogenomics allows a clinician or physician to target prophylactic or therapeutic treatments to patients who will most benefit from the treatment and to avoid treatment of patients who will experience toxic drug-related side effects.

[0331] 1. Prophylactic Methods

[0332] In one aspect, the invention provides a method for preventing in a subject, a disease or condition associated with an aberrant or unwanted TWIK-6 expression or activity, by administering to the subject a TWIK-6 or an agent which modulates TWIK-6 expression or at least one TWIK-6 activity. Subjects at risk for a disease which is caused or contributed to by aberrant or unwanted TWIK-6 expression or activity can be identified by, for example, any or a combination of diagnostic or prognostic assays as described herein. Administration of a prophylactic agent can occur prior to the manifestation of symptoms characteristic of the TWIK-6 aberrancy, such that a disease or disorder is prevented or, alternatively, delayed in its progression. Depending on the type of TWIK-6 aberrancy, for example, a TWIK-6, TWIK-6 agonist or TWIK-6 antagonist agent can be used for treating the subject. The appropriate agent can be determined based on screening assays described herein.

[0333] 2. Therapeutic Methods

[0334] Another aspect of the invention pertains to methods of modulating TWIK-6 expression or activity for therapeutic purposes. Accordingly, in an exemplary embodiment, the modulatory method of the invention involves contacting a cell with a TWIK-6 or agent that modulates one or more of the activities of TWIK-6 protein activity associated with the cell. An agent that modulates TWIK-6 protein activity can be an agent as described herein, such as a nucleic acid or a protein, a naturally-occurring target molecule of a TWIK-6 protein (e.g., a TWIK-6 substrate), a TWIK-6 antibody, a TWIK-6 agonist or antagonist, a peptidomimetic of a TWIK-6 agonist or antagonist, or other small molecule. In one embodiment, the agent stimulates one or more TWIK-6 activities. Examples of such stimulatory agents include active TWIK-6 protein and a nucleic acid molecule encoding TWIK-6 that has been introduced into the cell. In another embodiment, the agent inhibits one or more TWIK-6 activities. Examples of such inhibitory agents include antisense TWIK-6 nucleic acid molecules, anti-TWIK-6 antibodies, and TWIK-6 inhibitors. These modulatory methods can be performed in vitro (e.g., by culturing the cell with the agent) or, alternatively, in vivo (e.g., by administering the agent to a subject). As such, the present invention provides methods of treating an individual afflicted with a disease or disorder characterized by aberrant or unwanted expression or activity of a TWIK-6 protein or nucleic acid molecule. In one embodiment, the method involves administering an agent (e.g., an agent identified by a screening assay described herein), or combination of agents that modulates (e.g., upregulates or downregulates) TWIK-6 expression or activity. In another embodiment, the method involves administering a TWIK-6 protein or nucleic acid molecule as therapy to compensate for reduced, aberrant, or unwanted TWIK-6 expression or activity.

[0335] Stimulation of TWIK-6 activity is desirable in situations in which TWIK-6 is abnormally downregulated and/or in which increased TWIK-6 activity is likely to have a beneficial effect. Likewise, inhibition of TWIK-6 activity is desirable in situations in which TWIK-6 is abnormally upregulated and/or in which decreased TWIK-6 activity is likely to have a beneficial effect.

[0336] 3. Pharmacogenomics

[0337] The TWIK-6 molecules of the present invention, as well as agents, or modulators which have a stimulatory or inhibitory effect on TWIK-6 activity (e.g., TWIK-6 gene expression) as identified by a screening assay described herein can be administered to individuals to treat (prophylactically or therapeutically) TWIK-6-associated disorders (e.g., proliferative disorders) associated with aberrant or unwanted TWIK-6 activity. In conjunction with such treatment, pharmacogenomics (i.e., the study of the relationship between an individual's genotype and that individual's response to a foreign compound or drug) may be considered. Differences in metabolism of therapeutics can lead to severe toxicity or therapeutic failure by altering the relation between dose and blood concentration of the pharmacologically active drug. Thus, a physician or clinician may consider applying knowledge obtained in relevant pharmacogenomics studies in determining whether to administer a TWIK-6 molecule or TWIK-6 modulator as well as tailoring the dosage and/or therapeutic regimen of treatment with a TWIK-6 molecule or TWIK-6 modulator.

[0338] Pharmacogenomics deals with clinically significant hereditary variations in the response to drugs due to altered drug disposition and abnormal action in affected persons. See, for example, Eichelbaum, M. et al. (1996) Clin. Exp. Pharmacol. Physiol. 23(10-11): 983-985 and Linder, M. W. et al. (1997) Clin. Chem. 43(2):254-266. In general, two types of pharmacogenetic conditions can be differentiated. Genetic conditions transmitted as a single factor altering the way drugs act on the body (altered drug action) or genetic conditions transmitted as single factors altering the way the body acts on drugs (altered drug metabolism). These pharmacogenetic conditions can occur either as rare genetic defects or as naturally-occurring polymorphisms. For example, glucose-6-phosphate dehydrogenase deficiency (G6PD) is a common inherited enzymopathy in which the main clinical complication is haemolysis after ingestion of oxidant drugs (anti-malarials, sulfonamides, analgesics, nitrofurans) and consumption of fava beans.

[0339] One pharmacogenomics approach to identifying genes that predict drug response, known as “a genome-wide association”, relies primarily on a high-resolution map of the human genome consisting of already known gene-related markers (e.g., a “bi-allelic” gene marker map which consists of 60,000-100,000 polymorphic or variable sites on the human genome, each of which has two variants.) Such a high-resolution genetic map can be compared to a map of the genome of each of a statistically significant number of patients taking part in a Phase II/III drug trial to identify markers associated with a particular observed drug response or side effect. Alternatively, such a high resolution map can be generated from a combination of some ten-million known single nucleotide polymorphisms (SNPs) in the human genome. As used herein, a “SNP” is a common alteration that occurs in a single nucleotide base in a stretch of DNA. For example, a SNP may occur once per every 1000 bases of DNA. A SNP may be involved in a disease process, however, the vast majority may not be disease-associated. Given a genetic map based on the occurrence of such SNPs, individuals can be grouped into genetic categories depending on a particular pattern of SNPs in their individual genome. In such a manner, treatment regimens can be tailored to groups of genetically similar individuals, taking into account traits that may be common among such genetically similar individuals.

[0340] Alternatively, a method termed the “candidate gene approach”, can be utilized to identify genes that predict drug response. According to this method, if a gene that encodes a drugs target is known (e.g., a TWIK-6 protein of the present invention), all common variants of that gene can be fairly easily identified in the population and it can be determined if having one version of the gene versus another is associated with a particular drug response.

[0341] As an illustrative embodiment, the activity of drug metabolizing enzymes is a major determinant of both the intensity and duration of drug action. The discovery of genetic polymorphisms of drug metabolizing enzymes (e.g., N-acetyltransferase 2 (NAT 2) and cytochrome P450 enzymes CYP2D6 and CYP2C19) has provided an explanation as to why some patients do not obtain the expected drug effects or show exaggerated drug response and serious toxicity after taking the standard and safe dose of a drug. These polymorphisms are expressed in two phenotypes in the population, the extensive metabolizer (EM) and poor metabolizer (PM). The prevalence of PM is different among different populations. For example, the gene coding for CYP2D6 is highly polymorphic and several mutations have been identified in PM, which all lead to the absence of functional CYP2D6. Poor metabolizers of CYP2D6 and CYP2C19 quite frequently experience exaggerated drug response and side effects when they receive standard doses. If a metabolite is the active therapeutic moiety, PM show no therapeutic response, as demonstrated for the analgesic effect of codeine mediated by its CYP2D6-formed metabolite morphine. The other extreme are the so called ultra-rapid metabolizers who do not respond to standard doses. Recently, the molecular basis of ultra-rapid metabolism has been identified to be due to CYP2D6 gene amplification.

[0342] Alternatively, a method termed the “gene expression profiling”, can be utilized to identify genes that predict drug response. For example, the gene expression of an animal dosed with a drug (e.g., a TWIK-6 molecule or TWIK-6 modulator of the present invention) can give an indication whether gene pathways related to toxicity have been turned on.

[0343] Information generated from more than one of the above pharmacogenomics approaches can be used to determine appropriate dosage and treatment regimens for prophylactic or therapeutic treatment an individual. This knowledge, when applied to dosing or drug selection, can avoid adverse reactions or therapeutic failure and thus enhance therapeutic or prophylactic efficiency when treating a subject with a TWIK-6 molecule or TWIK-6 modulator, such as a modulator identified by one of the exemplary screening assays described herein.

[0344] This invention is further illustrated by the following examples which should not be construed as limiting. The contents of all references, patents and published patent applications cited throughout this application, as well as the Figures and the Sequence Listing, are incorporated herein by reference.

### EXAMPLES

### Example 1

### Identification and Characterization of Human TWIK-6 cDNA

[0345] In this example, the identification and characterization of the gene encoding human TWIK-6 (clones Fbh17831E and Fbh17831G) is described.

[0346] Isolation of the TWIK-6 cDNA

[0347] The invention is based, at least in part, on the discovery of a human gene encoding a novel protein, referred to herein as TWIK-6. The entire sequence of the human clone Fbh17831 was determined and found to contain an open reading frame termed human “TWIK-6.” It was further determined that this gene possesses an A to G nucleotide polymorphism at nucleotide 596, resulting in an E to G amino acid change at amino acid position 165 (resulting in clones Fbh17831E and Fbh17831G). The two alternate nucleotide sequences of the human TWIK-6 gene are set forth in FIGS. 1A-B and 2A-B and in the Sequence Listing as SEQ ID NOs: 1 and 3 or 4 and 6. The two alternate amino acid sequences of the human TWIK-6 expression product are set forth in FIGS. 1A-B and 2A-B and in the Sequence Listing as SEQ ID NO:2 or 5.

[0348] The nucleotide sequence encoding the human TWIK-6 (E¹⁶⁵) protein is shown in FIGS. 1A-B and is set forth as SEQ ID NO:1. The nucleotide sequence encoding the human TWIK-6 (G¹⁶⁵) protein is shown in FIGS. 2A-B and is set forth as SEQ ID NO:4. The protein encoded by each of these nucleic acids comprises about 400 amino acids and has the amino acid sequence shown in FIGS. 1A-B and 2A-B and set forth as SEQ ID NOs: 2 and 5, respectively. The coding regions (open reading frames) of SEQ ID NO:1 and 4 are set forth as SEQ ID NOs:3 and 6. Clones Fbh1783E and Fbh17831G, comprising the coding region of human TWIK-6 were deposited with the American Type Culture Collection (ATCC®), 10801 University Boulevard, Manassas, Va. 20110-2209, on ______, and assigned Accession No ______.

[0349] Analysis of the Human TWIK-6 Molecules

[0350] A BLASTN 2.0 search against the NRN database, using a score of 100 and a wordlength of 12 (Altschul et al. (1990) J. Mol. Biol. 215:403) of the nucleotide sequence of human TWIK-6 revealed that human TWIK-6 is 72% identical to Homo sapiens TWIK-related acid-sensitive K+ channel (TASK) mRNA (Accession Number AF006823) over nucleotides 200-1158 (as shown in FIG. 6). The search further revealed that human TWIK-6 is 73% identical to Mus musculus mRNA for cTBAK, complete cds (Accession Number AB013345) over nucleotides 180 to 1229. The search further revealed that human TWIK-6 is 69% identical to Rattus norvegicus TWIK-related acid-sensitive K+ channel (TASK) mRNA (Accession Number AF031384) over nucleotides 232 to 1229, and 78% identical over nucleotides 1482 to 1527. The search further revealed that human TWIK-6 is 70% identical to Mus musculus TWIK-related acid-sensitive K+ channel (TASK) mRNA (Accession Number AF006824) over nucleotides 324 to 1229, 77% identical over nucleotides 1492 to 1526, 95% identical over nucleotides 1506 to 1527, and 95% identical over nucleotides 1507 to 1528. The search further revealed that human TWIK-6 is 70% identical to Mus musculus mRNA for cTBAK (Accession Number AB008537) over nucleotides 303 to 924. This search further revealed that human TWIK-6 is 71% identical to Mus musculus putative potassium channel DP4 mRNA (Accession Number AF022821) over nucleotides 318 to 1217. This search further revealed that human TWIK-6 is homologous to genomic sequence for Homo sapiens clone 431C18 from chromosome 8 (locus D8S1741) (Accession Number AC007869)

[0351] A BLASTN 2.0 search against the dbEST database, using a score of 100 and a wordlength of 12 (Altschul et al. (1990) J. Mol. Biol. 215:403) of the nucleotide sequence of human TWIK-6 revealed that human TWIK-6 is 97% identical to xg70f06.x1 NCI_CGAP_Ut4 Homo sapiens cDNA clone IMAGE:2633699 3′ similar to TR:o35111 O35111 CTBAK (Accession Number AW167075) over nucleotides 1496 to 895. The search further revealed that human TWIK-6 is 98% identical to tz15g05.x1 NCI_CGAP_Ut2 Homo sapiens cDNA clone IMAGE:2288696 3′ similar to TR:O35111 O35111 CTBAK (Accession Number AI690321) over nucleotides 415 to 871. This search further revealed that human TWIK-6 is 100% identical to wi17h03.x1NCI_CGAP_Co16 Homo sapiens cDNA clone IMAGE: 2390549 3′ similar to TR:O35111 O35111 CTBAK (Accession Number AI739096) over nucleotides 460-827. This search further revealed that human TWIK-6 is 73% identical to ma07h04.y1 Soares mouse p3NMF19.5 Mus musculus cDNA clone IMAGE: 303895 5′ similar to TR:O35163 O35163 TWIK-RELATED ACID-SENSITIVE K+ CHANNEL (Accession Number AI605559) over nucleotides 324-998. The search further revealed that human TWIK-6 is 97% identical to oo19e06.x1 Soares_NSF_F8_{—}9W_OT₁₃ PA_P_S1 Homo sapiens cDNA clone IMAGE:1566658 (Accession Number AI091631) over nucleotides 1528 to 1193. This search further revealed that human TWIK-6 is 89% identical to wt90e12.x1 NCI_CGAP_GC6 Homo sapiens cDNA clone IMAGE: 2514766 3′ similar to TR:014649 O14649 TWIK-RELATED ACID-SENSITIVE K+ CHANNEL (Accession Number AI968607) over nucleotides 417-808 and 92% identical over nucleotides 388 to 219. The search further revealed that human TWIK-6 is 72% identical to mf89d07.x1 Soares mouse embryo NbME13.5 14.5 Mus musculus cDNA clone IMAGE:421453 3′ similar to WP:C40C9.1 CE05398 POTASSIUM CHANNEL PROTEIN (Accession Number AI327069) over nucleotides 1173 to 553. The search further revealed that human TWIK-6 is 76% identical to mf89d07.y1 Soares mouse embryo NbME13.5 14.5 Mus musculus cDNA clone IMAGE:421453 5′ similar to TR:O35111 O35111 MCTBAK (Accession Number AI325858) over nucleotides 508 to 989. The search further revealed that human TWIK-6 is 73% identical to EST291996 normalized rat ovary, Bento Soares Rattus sp. cDNA clone RGICN44 5′ end similar to TWIK-related acid-sensitive K+ channel (Accession Number AW141881) over nucleotides 620 to 1142. The search further revealed that human TWIK-6 is 88% identical to UI-M-BH2.2-aos-c-07-0-UI.s1 NIH_BMAP_M_S3.2 Mus musculus cDNA clone UI-M-BH2.2-aos-c-07-0-UI (Accession Number AW122298) over nucleotides 764 to 1054. A BLASTN 2.0 search against the PATENT_{—}2/patentDbpreviewNuc database, using a score of 100 and a wordlength of 12 (Altschul et al. (1990) J. Mol. Biol. 215:403) of the nucleotide sequence of human TWIK-6 revealed that human TWIK-6 is 73% identical to human signal peptide-containing sequence from WO 00/00610 (Accession Number AC36763) over nucleotides 281 to 1158. This search further revealed that human TWIK-6 is 58% identical to human potassium channel genes from WO 99/43696 (Accession Number AC29586) over nucleotides 242 to 1188.

[0352] A BLASTX 2.0 search against the NRP/protot database, using a score of 100 and a wordlength of 3 (Altschul et al. (1990) J. Mol. Biol. 215:403), of the translated nucleotide sequence of human TWIK-6 revealed that human TWIK-6 is 64% identical to cTBAK from Mus musculus (Accession Number AB008537) over translated nucleotides 313 to 1086, 44% identical over translated nucleotides 1253 to 1354, and 33% identical over translated nucleotides 1253 to 1369. The search further revealed that human TWIK-6 is 65% identical to TWIK-related acid-sensitive K+ channel from Homo sapiens (Accession Number AF006823) over translated nucleotides 313 to 1086, 40% identical over translated nucleotides 1265 to 1354, and 33% identical over translated nucleotides 1253 to 1369 (as shown in FIG. 6). The search further revealed that human TWIK-6 is 64% identical to TWIK-related acid-sensitive K+ channel from Rattus norvegicus (Accession Number AF031384) over translated nucleotides 313 to 1086, 42% identical over translated nucleotides 1253 to 1354, and 33% identical over translated nucleotides 1253 to 1369. The search further revealed that human TWIK-6 is 64% identical to TWIK-related acid-sensitive K+ channel from Mus musculus (Accession Number AF006824) over translated nucleotides 325 to 1086, 44% identical over translated nucleotides 1253 to 1354, and 33% identical over translated nucleotides 1253 to 1369. The search further revealed that human TWIK-6 is 65% identical to putative potassium channel DP4 from Mus musculus (Accession Number AAD09338) over translated nucleotides 325 to 1086. The search further revealed that human TWIK-6 is 52% identical to putative potassium channel subunit n2P38 from Caenorhabditis elegans (Accession Number AF083652) over translated nucleotides 313 to 1068. The search further revealed that human TWIK-6 is 51% identical to outward rectifier potassium channel homolog twk-23 from Caenorhabditis elegans (Accession Number AF025454) over translated nucleotides 313 to 1068.

[0353] An alignment of the human TWIK-6 amino acid sequence with the amino acid sequences of TWIK-related acid-sensitive K+ channel from Homo sapiens (Accession Number AF006823) and TWIK-related acid-sensitive K+ channel from Rattus norvegicus (Accession Number AF031384) using the CLUSTAL W (1.74) multiple sequence alignment program is set forth in FIG. 6.

[0354] A search was performed against the Memsat database (FIG. 6), resulting in the identification of four transmembrane domains in the amino acid sequence of human TWIK-6 (SEQ ID NO: 2 or SEQ ID NO:4) at about residues 78-96, 178-195, 229-248, and 290-314. This search further identified two Pore-loop domains (P-loop domains) at residues 150-166 and 260-278.

[0355] A search was also performed against the ProDom database resulting in the identification of a potassium channel protein domain in the amino acid sequence of human TWIK-6 (SEQ ID NO:2 or 5) at about residues 81-312 (score=162). This search further resulted in the identification of a TWIK-related ion channel domain in the amino acid sequence of human TWIK-6 (SEQ ID NO:2 or 5) at about residues 75-144 (score=149). The results of the search are set forth in FIG. 8.

[0356] Tissue Distribution of TWIK-6 mRNA

[0357] This example describes the tissue distribution of TWIK-6 mRNA, as was determined by Polymerase Chain Reaction (PCR) on cDNA libraries using oligonucleotide primers based on the human TWIK-6 sequence.

[0358] The human TWIK-6 gene is expressed in thymus, in salivary gland, in primary cultured osteoblasts, and in ovarian epithelium tumor cells.

### Example 2

### Expression of Recombinant TWIK-6 Protein in Bacterial Cells

[0359] In this example, TWIK-6 is expressed as a recombinant glutathione-S-transferase (GST) fusion polypeptide in E. coli and the fusion polypeptide is isolated and characterized. Specifically, TWIK-6 is fused to GST and this fusion polypeptide is expressed in E. coli, e.g., strain PEB199. Expression of the GST-TWIK-6 fusion protein in PEB199 is induced with IPTG. The recombinant fusion polypeptide is purified from crude bacterial lysates of the induced PEB199 strain by affinity chromatography on glutathione beads. Using polyacrylamide gel electrophoretic analysis of the polypeptide purified from the bacterial lysates, the molecular weight of the resultant fusion polypeptide is determined.

### Example 3

### Expression of Recombinant TWIK-6 Protein in COS Cells

[0360] To express the TWIK-6 gene in COS cells, the pcDNA/Amp vector by Invitrogen Corporation (San Diego, Calif.) is used. This vector contains an SV40 origin of replication, an ampicillin resistance gene, an E. coli replication origin, a CMV promoter followed by a polylinker region, and an SV40 intron and polyadenylation site. A DNA fragment encoding the entire TWIK-6 protein and an HA tag (Wilson et al. (1984) Cell 37:767) or a FLAG tag fused in-frame to its 3′ end of the fragment is cloned into the polylinker region of the vector, thereby placing the expression of the recombinant protein under the control of the CMV promoter.

[0361] To construct the plasmid, the TWIK-6 DNA sequence is amplified by PCR using two primers. The 5′ primer contains the restriction site of interest followed by approximately twenty nucleotides of the TWIK-6 coding sequence starting from the initiation codon; the 3′ end sequence contains complementary sequences to the other restriction site of interest, a translation stop codon, the HA tag or FLAG tag and the last 20 nucleotides of the TWIK-6 coding sequence. The PCR amplified fragment and the pCDNA/Amp vector are digested with the appropriate restriction enzymes and the vector is dephosphorylated using the CIAP enzyme (New England Biolabs, Beverly, Mass.). Preferably the two restriction sites chosen are different so that the TWIK-6 gene is inserted in the correct orientation. The ligation mixture is transformed into E. coil cells (strains HB101, DH5α, SURE, available from Stratagene Cloning Systems, La Jolla, Calif., can be used), the transformed culture is plated on ampicillin media plates, and resistant colonies are selected. Plasmid DNA is isolated from transformants and examined by restriction analysis for the presence of the correct fragment.

[0362] COS cells are subsequently transfected with the TWIK-6-pcDNA/Amp plasmid DNA using the calcium phosphate or calcium chloride co-precipitation methods, DEAE-dextran-mediated transfection, lipofection, or electroporation. Other suitable methods for transfecting host cells can be found in Sambrook, J., Fritsh, E. F., and Maniatis, T. Molecular Cloning: A Laboratory Manual. 2nd, ed., Cold Spring Harbor Laboratory, Cold Spring Harbor Laboratory Press, Cold Spring Harbor, N.Y., 1989. The expression of the TWIK-6 polypeptide is detected by radiolabeling (³⁵S-methionine or ³⁵S-cysteine available from NEN, Boston, Mass., can be used) and immunoprecipitation (Harlow, E. and Lane, D. Antibodies: A Laboratory Manual, Cold Spring Harbor Laboratory Press, Cold Spring Harbor, N.Y., 1988) using an HA specific monoclonal antibody. Briefly, the cells are labeled for 8 hours with ³⁵S-methionine (or ³⁵S-cysteine). The culture media are then collected and the cells are lysed using detergents (RIPA buffer, 150 mM NaCl, 1% NP-40, 0.1% SDS, 0.5% DOC, 50 mM Tris, pH 7.5). Both the cell lysate and the culture media are precipitated with an HA specific monoclonal antibody. Precipitated polypeptides are then analyzed by SDS-PAGE.

[0363] Alternatively, DNA containing the TWIK-6 coding sequence is cloned directly into the polylinker of the pCDNA/Amp vector using the appropriate restriction sites. The resulting plasmid is transfected into COS cells in the manner described above, and the expression of the TWIK-6 polypeptide is detected by radiolabeling and immunoprecipitation using a TWIK-6 specific monoclonal antibody.

### II. NUCLEIC ACIDS ENCODING TWIK-7, A NOVEL POTASSIUM CHANNEL PROTEIN

### Background of the Invention

[0364] Potassium (K⁺) channels are ubiquitous proteins which are involved in the setting of the resting membrane potential as well as in the modulation of the electrical activity of cells. In excitable cells, K⁺ channels influence action potential waveforms, firing frequency, and neurotransmitter secretion (Rudy, B. (1988) Neuroscience, 25, 729-749; Hille, B. (1992) Ionic Channels of Excitable Membranes, 2nd Ed.). In non-excitable cells, they are involved in hormone secretion, cell volume regulation and potentially in cell proliferation and differentiation (Lewis et al. (1995) Annu. Rev. Immunol., 13, 623-653). Developments in electrophysiology have allowed the identification and the characterization of an astonishing variety of K⁺ channels that differ in their biophysical properties, pharmacology, regulation and tissue distribution (Rudy, B. (1988) Neuroscience, 25, 729-749; Hille, B. (1992) Ionic Channels of Excitable Membranes, 2nd Ed.). More recently, cloning efforts have shed considerable light on the mechanisms that determine this functional diversity. Furthermore, analyses of structure-function relationships have provided an important set of data concerning the molecular basis of the biophysical properties (selectivity, gating, assembly) and the pharmacological properties of cloned K⁺ channels.

[0365] Functional diversity of K⁺ channels arises mainly from the existence of a great number of genes coding for pore-forming subunits, as well as for other associated regulatory subunits. Two main structural families of pore-forming subunits have been identified. The first one consists of subunits with a conserved hydrophobic core containing six transmembrane domains (TMDs). These K⁺ channel a subunits participate in the formation of outward rectifier voltage-gated (Kv) and Ca²⁺-dependent K⁺ channels. The fourth TMD contains repeated positive charges involved in the voltage gating of these channels and hence in their outward rectification (Logothetis et al. (1992) Neuron, 8, 531-540; Bezanilla et al. (1994) Biophys. J. 66,1011-1021).

[0366] The second family of pore-forming subunits have only two TMDs. They are essential subunits of inward-rectifying (IRK), G-protein-coupled (GIRK) and ATP-sensitive (K_{ATP}) K⁺ channels. The inward rectification results from a voltage-dependent block by cytoplasmic Mg²⁺ and polyamines (Matsuda, H. (1991) Annu. Rev. Physiol., 53, 289-298). A conserved domain, called the P domain, is present in all members of both families (Pongs, O. (1993) J. Membr. Biol., 136, 1-8; Heginbotham et al. (1994) Biophys. J. 66,1061-1067; Mackinnon, R. (1995) Neuron, 14, 889-892; Pascual et al., (1995) Neuron., and 14, 1055-1063). This domain is an essential element of the aqueous K⁺-selective pore. In both groups, the assembly of four subunits is necessary to form a functional K⁺ channel (Mackinnon, R. (1991) Nature, 350, 232-235; Yang et al., (1995) Neuron, 15, 1441-1447.

[0367] In both six TMD and two TMD pore-forming subunit families, different subunits coded by different genes can associate to form heterotetramers with new channel properties (Isacoff et al., (1990) Nature, 345, 530-534). A selective formation of heteropolymeric channels may allow each cell to develop the best K⁺ current repertoire suited to its function. Pore-forming α subunits of Kv channels are classified into different subfamilies according to their sequence similarity (Chandy et al. (1993) Trends Pharmacol Sci., 14, 434). Tetramerization is believed to occur preferentially between members of each subgroup (Covarrubias et al. (1991) Neuron, 7, 763-773). The domain responsible for this selective association is localized in the N-terminal region and is conserved between members of the same subgroup. This domain is necessary for hetero- but not homomultimeric assembly within a subfamily and prevents co-assembly between subfamilies. Recently, pore-forming subunits with two TMDs were also shown to co-assemble to form heteropolymers (Duprat et al. (1995) Biochem. Biophys. Res. Commun., 212, 657-663. This heteropolymerization seems necessary to give functional GIRKs. IRKs are active as homopolymers but also form heteropolymers.

[0368] New structural types of K⁺ channels were identified recently in both humans and yeast. These channels have two P domains in their functional subunit instead of only one (Ketchum et al. (1995) Nature, 376, 690-695; Lesage et al. (1996) J. Biol. Chem, 271, 4183-4187; Lesage et al. (1996) EMBO J., 15, 1004-1011; Reid et al. (1996) Receptors Channels 4, 51-62). The human channel called TWIK-1, has four TMDs. TWIK-1 is expressed widely in human tissues and is particularly abundant in the heart and the brain. TWIK-1 currents are time independent and inwardly rectifying. These properties suggest that TWIK-1 channels are involved in the control of the background K⁺ membrane conductance (Lesage et al. (1996) EMBO J., 15, 1004-1011).

### Summary of the Invention

[0369] The present invention is based, at least in part, on the discovery of novel members of the TWIK (for Tandem of P domains in a Weak Inward rectifying K⁺ channel) family of potassium channels, referred to herein as TWIK-7 nucleic acid and protein molecules. The TWIK-7 molecules of the present invention are useful as targets for developing modulating agents to regulate a variety of cellular processes. Accordingly, in one aspect, this invention provides isolated nucleic acid molecules encoding TWIK proteins or biologically active portions thereof, as well as nucleic acid fragments suitable as primers or hybridization probes for the detection of TWIK-encoding nucleic acids.

[0370] In one embodiment, a TWIK-7 nucleic acid molecule of the invention is at least 50%, 55%, 60%, 65%, 70%, 73%, 74%, 75%, 80%, 85%, 90%, 95%, 96%, 97%, 98%, 99% or more identical to the nucleotide sequence (e.g., to the entire length of the nucleotide sequence) shown in SEQ ID NO:14 or 16, or a complement thereof. In a preferred embodiment, the isolated nucleic acid molecule includes the nucleotide sequence shown SEQ ID NO:14 or 16, or a complement thereof. In another embodiment, the nucleic acid molecule includes SEQ ID NO:16 and nucleotides 1-465 of SEQ ID NO:14. In yet another embodiment, the nucleic acid molecule includes SEQ ID NO:16 and nucleotides 1759-1943 of SEQ ID NO:14. In another preferred embodiment, the nucleic acid molecule consists of the nucleotide sequence shown in SEQ ID NO:14 or 16. In another preferred embodiment, the nucleic acid molecule includes a fragment of at least 50, 100, 150, 200, 250, 300, 350, 400, 450, 500, 550, 600, 650, 700, 750, 800, 850, 900, 950, 1000, 1050, 1100, 1150, 1200, 1250, 1300, 1350, 1400, 1450, 1500, 1550, 1600, 1650, 1700, 1750, 1800, 1850, 1900, or 1910 nucleotides (e.g., 100 contiguous nucleotides) of the nucleotide sequence of SEQ ID NO:14 or 16, or a complement thereof.

[0371] In another embodiment, a TWIK-7 nucleic acid molecule includes a nucleotide sequence encoding a protein having an amino acid sequence sufficiently identical to the amino acid sequence of SEQ ID NO:15. In a preferred embodiment, a TWIK-7 nucleic acid molecule includes a nucleotide sequence encoding a protein having an amino acid sequence at least 50%, 55%, 60%, 65%, 67%, 68%, 70%, 75%, 80%, 85%, 90%, 95%, 96%, 97%, 98%, 99% or more identical to the entire length of the amino acid sequence of SEQ ID NO:15.

[0372] In another preferred embodiment, an isolated nucleic acid molecule encodes the amino acid sequence of human TWIK-7. In yet another preferred embodiment, the nucleic acid molecule includes a nucleotide sequence encoding a protein having the amino acid sequence of SEQ ID NO:15. In yet another preferred embodiment, the nucleic acid molecule is at least 1910 nucleotides in length. In a further preferred embodiment, the nucleic acid molecule is at least 1910 nucleotides in length and encodes a protein having a TWIK-7 activity (as described herein).

[0373] Another embodiment of the invention features nucleic acid molecules, preferably TWIK-7 nucleic acid molecules, which specifically detect TWIK-7 nucleic acid molecules relative to nucleic acid molecules encoding non-TWIK-7 proteins. For example, in one embodiment, such a nucleic acid molecule is at least 50, 100, 150, 200, 250, 300, 350, 400, 450, 500, 550, 600, 650, 700, 750, 800, 850, 900, 950, 1000, 1050, 1100, 1150, 1200, 1250, 1300, 1350, 1400, 1450, 1500, 1550, 1600, 1650, 1700, 1750, 1800, 1850, 1900, 1910, 1910-1920, 1920-1940, or more nucleotides in length and hybridizes under stringent conditions to a nucleic acid molecule comprising the nucleotide sequence shown in SEQ ID NO:14 or a complement thereof.

[0374] In other preferred embodiments, the nucleic acid molecule encodes a naturally occurring allelic variant of a polypeptide comprising the amino acid sequence of SEQ ID NO:15, wherein the nucleic acid molecule hybridizes to a nucleic acid molecule comprising SEQ ID NO:14 or 16 under stringent conditions.

[0375] Another embodiment of the invention provides an isolated nucleic acid molecule which is antisense to a TWIK-7 nucleic acid molecule, e.g., the coding strand of a TWIK-7 nucleic acid molecule.

[0376] Another aspect of the invention provides a vector comprising a TWIK-7 nucleic acid molecule. In certain embodiments, the vector is a recombinant expression vector. In another embodiment, the invention provides a host cell containing a vector of the invention. In yet another embodiment, the invention provides a host cell containing a nucleic acid molecule of the invention. The invention also provides a method for producing a protein, preferably a TWIK-7 protein, by culturing in a suitable medium, a host cell, e.g., a mammalian host cell such as a non-human mammalian cell, of the invention containing a recombinant expression vector, such that the protein is produced.

[0377] Another aspect of this invention features isolated or recombinant TWIK-7 proteins and polypeptides. In one embodiment, an isolated TWIK-7 protein includes at least one transmembrane domain. In yet another embodiment, an isolated TWIK-7 protein includes a potassium channel protein domain. In yet another embodiment, an isolated TWIK-7 protein includes a P-loop domain. In yet another embodiment, an isolated TWIK-7 protein includes at least one transmembrane domain and one or more of a P-loop domain and a potassium channel protein domain. In yet another embodiment, an isolated TWIK-7 protein includes at least one transmembrane domain, a P-loop domain, and a potassium channel protein domain.

[0378] In a preferred embodiment, a TWIK-7 protein includes at least one transmembrane domain and has an amino acid sequence at least about 50%, 55%, 60%, 65%, 67%, 68%, 70%, 75%, 80%, 85%, 90%, 95%, 96%, 97%, 98%, 99% or more identical to the amino acid sequence of SEQ ID NO:15. In a further preferred embodiment, a TWIK-7 protein includes a potassium channel protein domain and has an amino acid sequence at least about 50%, 55%, 60%, 65%, 70%, 75%, 80%, 85%, 90%, 95%, 96%, 97%, 98%, 99% or more identical to the amino acid sequence of SEQ ID NO:15. In a further preferred embodiment, a TWIK-7 protein includes at least one P-loop domain and has an amino acid sequence at least about 50%, 55%, 60%, 65%, 70%, 75%, 80%, 85%, 90%, 95%, 96%, 97%, 98%, 99% or more identical to the amino acid sequence of SEQ ID NO:15. In a further preferred embodiment, a TWIK-7 protein includes at least one transmembrane domain and one or more of a P-loop domain and/or a potassium channel protein domain, and has an amino acid sequence at least about 50%, 55%, 60%, 65%, 70%, 75%, 80%, 85%, 90%, 95%, 96%, 97%, 98%, 99% or more identical to the amino acid sequence of SEQ ID NO:15.

[0379] In another preferred embodiment, a TWIK-7 protein includes at least one transmembrane domain and has a TWIK-7 activity (as described herein).

[0380] In yet another preferred embodiment, a TWIK-7 protein includes at least one transmembrane domain and is encoded by a nucleic acid molecule having a nucleotide sequence which hybridizes under stringent hybridization conditions to a nucleic acid molecule comprising the nucleotide sequence of SEQ ID NO:14 or 16. In a further embodiment, a TWIK-7 protein includes a P-loop domain and is encoded by a nucleic acid molecule having a nucleotide sequence which hybridizes under stringent hybridization conditions to a nucleic acid molecule comprising the nucleotide sequence of SEQ ID NO:14 or 16. In a further embodiment, a TWIK-7 protein includes a potassium channel protein domain and is encoded by a nucleic acid molecule having a nucleotide sequence which hybridizes under stringent hybridization conditions to a nucleic acid molecule comprising the nucleotide sequence of SEQ ID NO:14 or 16. In another embodiment, a TWIK-7 protein includes at least one transmembrane domain and one or more of a P-loop domain and/or a potassium channel protein domain, and is encoded by a nucleic acid molecule having a nucleotide sequence which hybridizes under stringent hybridization conditions to a nucleic acid molecule comprising the nucleotide sequence of SEQ ID NO:14 or 16.

[0381] In another embodiment, the invention features fragments of the protein having the amino acid sequence of SEQ ID NO:15, wherein the fragment comprises at least 15 amino acids (e.g, 15 contiguous amino acids) of the amino acid sequence of SEQ ID NO:15. In another embodiment, a TWIK-7 protein has the amino acid sequence of SEQ ID NO:15.

[0382] In another embodiment, the invention features a TWIK-7 protein which is encoded by a nucleic acid molecule consisting of a nucleotide sequence at least about 50%, 55%, 60%, 65%, 70%, 73%, 74%, 75%, 80%, 85%, 90%, 95%, 96%, 97%, 98%, 99% or more identical to a nucleotide sequence of SEQ ID NO:14 or 16, or a complement thereof. This invention further features a TWIK-7 protein, which is encoded by a nucleic acid molecule consisting of a nucleotide sequence which hybridizes under stringent hybridization conditions to a nucleic acid molecule comprising the nucleotide sequence of SEQ ID NO:14 or 16, or a complement thereof.

[0383] The proteins of the present invention or portions thereof, e.g., biologically active portions thereof, can be operatively linked to a non-TWIK-7 polypeptide (e.g., heterologous amino acid sequences) to form fusion proteins. The invention further features antibodies, such as monoclonal or polyclonal antibodies, that specifically bind proteins of the invention, preferably TWIK-7 proteins. In addition, the TWIK-7 proteins or biologically active portions thereof can be incorporated into pharmaceutical compositions, which optionally include pharmaceutically acceptable carriers.

[0384] In another aspect, the present invention provides a method for detecting the presence of a TWIK-7 nucleic acid molecule, protein, or polypeptide in a biological sample by contacting the biological sample with an agent capable of detecting a TWIK-7 nucleic acid molecule, protein, or polypeptide such that the presence of a TWIK-7 nucleic acid molecule, protein or polypeptide is detected in the biological sample.

[0385] In another aspect, the present invention provides a method for detecting the presence of TWIK-7 activity in a biological sample by contacting the biological sample with an agent capable of detecting an indicator of TWIK-7 activity such that the presence of TWIK-7 activity is detected in the biological sample.

[0386] In another aspect, the invention provides a method for modulating TWIK-7 activity comprising contacting a cell capable of expressing TWIK-7 with an agent that modulates TWIK-7 activity such that TWIK-7 activity in the cell is modulated. In one embodiment, the agent inhibits TWIK-7 activity. In another embodiment, the agent stimulates TWIK-7 activity. In one embodiment, the agent is an antibody that specifically binds to a TWIK-7 protein. In another embodiment, the agent modulates expression of TWIK-7 by modulating transcription of a TWIK-7 gene or translation of a TWIK-7 mRNA. In yet another embodiment, the agent is a nucleic acid molecule having a nucleotide sequence that is antisense to the coding strand of a TWIK-7 mRNA or a TWIK-7 gene.

[0387] In one embodiment, the methods of the present invention are used to treat a subject having a disorder characterized by aberrant or unwanted TWIK-7 protein or nucleic acid expression or activity by administering an agent which is a TWIK-7 modulator to the subject. In one embodiment, the TWIK-7 modulator is a TWIK-7 protein. In another embodiment the TWIK-7 modulator is a TWIK-7 nucleic acid molecule. In yet another embodiment, the TWIK-7 modulator is a peptide, peptidomimetic, or other small molecule. In a preferred embodiment, the disorder characterized by aberrant or unwanted TWIK-7 protein or nucleic acid expression is a CNS disorder, such as a cognitive or neurodegenerative disorder. In another preferred embodiment, the disorder characterized by aberrant or unwanted TWIK-7 protein or nucleic acid expression is a cardiovascular disorder. In another preferred embodiment, the disorder characterized by aberrant or unwanted TWIK-7 protein or nucleic acid expression is a muscular disorder. In another embodiment, the disorder characterized by aberrant or unwanted TWIK-7 activity is a cell proliferation, growth, differentiation, or migration disorder. In another embodiment, the disorder characterized by aberrant or unwanted TWIK-7 activity is a pain disorder, or a disorder characterized by misregulated pain signaling mechanisms.

[0388] The present invention also provides diagnostic assays for identifying the presence or absence of a genetic alteration characterized by at least one of (i) aberrant modification or mutation of a gene encoding a TWIK-7 protein; (ii) mis-regulation of the gene; and (iii) aberrant post-translational modification of a TWIK-7 protein, wherein a wild-type form of the gene encodes a protein with a TWIK-7 activity.

[0389] In another aspect the invention provides methods for identifying a compound that binds to or modulates the activity of a TWIK-7 protein, by providing an indicator composition comprising a TWIK-7 protein having TWIK-7 activity, contacting the indicator composition with a test compound, and determining the effect of the test compound on TWIK-7 activity in the indicator composition to identify a compound that modulates the activity of a TWIK-7 protein.

[0390] Other features and advantages of the invention will be apparent from the following detailed description and claims.

### DETAILED DESCRIPTION OF THE INVENTION

[0391] The present invention is based, at least in part, on the discovery of novel molecules, referred to herein as TWIK-7 nucleic acid and protein molecules, which are novel members of the TWIK (for Tandem of P domains in a Weak Inward rectifying K⁺ channel) family of potassium channels. These novel molecules are capable of, for example, modulating a potassium channel mediated activity in a cell, e.g., a neuronal cell, a muscle cell, or a spleen cell.

[0392] As used herein, a “potassium channel” includes a protein or polypeptide which is involved in receiving, conducting, and transmitting signals in an electrically excitable cell, e.g., a neuronal cell, a muscle cell (e.g., cardiac muscle), or a spleen cell. Potassium channels are potassium ion selective, and can determine membrane excitability (the ability of, for example, a neuron to respond to a stimulus and convert it into an impulse). Potassium channels can also influence the resting potential of membranes, wave forms and frequencies of action potentials, and thresholds of excitation. Potassium channels are typically expressed in electrically excitable cells, e.g., neurons, muscle, endocrine, and egg cells, and may form heteromultimeric structures, e.g., composed of pore-forming α and cytoplasmic β subunits. Potassium channels may also be found in nonexcitable cells (e.g., spleen cells or prostate cells), where they may play a role in, e.g., signal transduction. Examples of potassium channels include: (1) the voltage-gated potassium channels, (2) the ligand-gated potassium channels, e.g., neurotransmitter-gated potassium channels, and (3) cyclic-nucleotide-gated potassium channels. Voltage-gated and ligand-gated potassium channels are expressed in the brain, e.g., in brainstem monoaminergic and forebrain cholinergic neurons, where they are involved in the release of neurotransmitters, or in the dendrites of hippocampal and neocortical pyramidal cells, where they are involved in the processes of learning and memory formation. For a detailed description of potassium channels, see Kandel E. R.. et al., Principles of Neural Science, second edition, (Elsevier Science Publishing Co., Inc., N.Y. (1985)), the contents of which are incorporated herein by reference. As the TWIK proteins of the present invention may modulate potassium channel mediated activities, they may be useful for developing novel diagnostic and therapeutic agents for potassium channel associated disorders.

[0393] As used herein, a “potassium channel associated disorder” includes a disorder, disease or condition which is characterized by a misregulation of a potassium channel mediated activity. Potassium channel associated disorders can detrimentally affect conveyance of sensory impulses from the periphery to the brain and/or conductance of motor impulses from the brain to the periphery; integration of reflexes; interpretation of sensory impulses; and emotional, intellectual (e.g., learning and memory), or motor processes. Examples of potassium channel associated disorders include CNS disorders such as cognitive and neurodegenerative disorders, examples of which include, but are not limited to, Alzheimer's disease, dementias related to Alzheimer's disease (such as Pick's disease), Parkinson's and other Lewy diffuse body diseases, senile dementia, Huntington's disease, Gilles de la Tourette's syndrome, multiple sclerosis, amyotrophic lateral sclerosis, movement disorders, progressive supranuclear palsy, epilepsy, and Jakob-Creutzfieldt disease; autonomic function disorders such as hypertension and sleep disorders, and neuropsychiatric disorders, such as depression, schizophrenia, schizoaffective disorder, korsakoff's psychosis, mania, anxiety disorders, or phobic disorders; learning or memory disorders, e.g., amnesia or age-related memory loss, attention deficit disorder, dysthymic disorder, major depressive disorder, mania, obsessive-compulsive disorder, psychoactive substance use disorders, anxiety, phobias, panic disorder, as well as bipolar affective disorder, e.g., severe bipolar affective (mood) disorder (BP-1), and bipolar affective neurological disorders, e.g., migraine and obesity. Further CNS-related disorders include, for example, those listed in the American Psychiatric Association's Diagnostic and Statistical manual of Mental Disorders (DSM), the most current version of which is incorporated herein by reference in its entirety.

[0394] Further examples of potassium channel associated disorders include cardiac-related disorders. Cardiovascular system disorders in which the TWIK-7 molecules of the invention may be directly or indirectly involved include arteriosclerosis, ischemia reperfusion injury, restenosis, arterial inflammation, vascular wall remodeling, ventricular remodeling, rapid ventricular pacing, coronary microembolism, tachycardia, bradycardia, pressure overload, aortic bending, coronary artery ligation, vascular heart disease, atrial fibrilation, Jervell syndrome, Lange-Nielsen syndrome, long-QT syndrome, congestive heart failure, sinus node dysfunction, angina, heart failure, hypertension, atrial fibrillation, atrial flutter, dilated cardiomyopathy, idiopathic cardiomyopathy, myocardial infarction, coronary artery disease, coronary artery spasm, and arrhythmia. TWIK-7-mediated or related disorders also include disorders of the musculoskeletal system such as paralysis and muscle weakness, e.g., ataxia, myotonia, and myokymia.

[0395] Further disorders in which the TWIK-7 molecules of the invention may be involved are pain disorders. Pain disorders include those that affect pain signaling mechanisms. As used herein, the term “pain signaling mechanisms” includes the cellular mechanisms involved in the development and regulation of pain, e.g., pain elicited by noxious chemical, mechanical, or thermal stimuli, in a subject, e.g., a mammal such as a human. In mammals, the initial detection of noxious chemical, mechanical, or thermal stimuli, a process referred to as “nociception”, occurs predominantly at the peripheral terminals of specialized, small diameter sensory neurons. These sensory neurons transmit the information to the central nervous system, evoking a perception of pain or discomfort and initiating appropriate protective reflexes. The TWIK-7 molecules of the present invention may be present on these sensory neurons and, thus, may be involved in detecting these noxious chemical, mechanical, or thermal stimuli and transducing this information into membrane depolarization events. Thus, the TWIK-7 molecules by participating in pain signaling mechanisms, may modulate pain elicitation and act as targets for developing novel diagnostic targets and therapeutic agents to control pain. Examples of pain disorders include headache (e.g., tension headache or migraine), back pain, cancer pain, arthritis pain, or neurogenic pain.

[0396] Potassium channel disorders also include cellular proliferation, growth, differentiation, or migration disorders. Cellular proliferation, growth, differentiation, or migration disorders include those disorders that affect cell proliferation, growth, differentiation, or migration processes. As used herein, a “cellular proliferation, growth, differentiation, or migration process” is a process by which a cell increases in number, size or content, by which a cell develops a specialized set of characteristics which differ from that of other cells, or by which a cell moves closer to or further from a particular location or stimulus. The TWIK-7 molecules of the present invention are involved in signal transduction mechanisms, which are known to be involved in cellular growth, differentiation, and migration processes. Thus, the TWIK-7 molecules may modulate cellular growth, differentiation, or migration, and may play a role in disorders characterized by aberrantly regulated growth, differentiation, or migration. Such disorders include cancer, e.g., carcinoma, sarcoma, or leukemia; tumor angiogenesis and metastasis; skeletal dysplasia; neuronal deficiencies resulting from impaired neural induction and patterning; neurodegenerative disorders, e.g., Alzheimer's disease, dementias related to Alzheimer's disease (such as Pick's disease), Parkinson's and other Lewy diffuse body diseases, multiple sclerosis, amyotrophic lateral sclerosis, progressive supranuclear palsy, epilepsy, Jakob-Creutzfieldt disease, or AIDS related dementia; hepatic disorders; cardiovascular disorders; and hematopoietic and/or myeloproliferative disorders.

[0397] TWIK-7-associated or related disorders also include disorders of tissues in which TWIK-7 protein is expressed, e.g., cerebellum, spinal cord, dorsal root ganglia, prostate, uterus and spleen cells. Such disorders include, for example, CNS disorders, muscular disorders, or pain disorders.

[0398] As used herein, a “potassium channel mediated activity” includes an activity which involves a potassium channel, e.g., a potassium channel in a neuronal cell, a muscle cell (e.g., cardiac muscle), or a spleen cell, associated with receiving, conducting, and transmitting signals in, for example, the nervous system. Potassium channel mediated activities include release of neurotransmitters, e.g, dopamine or norepinephrine, from cells, e.g., neuronal cells; modulation of resting potential of membranes, wave forms and frequencies of action potentials, and thresholds of excitation; and modulation of processes such as integration of sub-threshold synaptic responses, the conductance of back-propagating action potentials in, for example, neuronal cells or muscle cells, participation in signal transduction pathways, and participation in nociception.

[0399] The term “family” when referring to the protein and nucleic acid molecules of the invention is intended to mean two or more proteins or nucleic acid molecules having a common structural domain or motif and having sufficient amino acid or nucleotide sequence homology as defined herein. Such family members can be naturally or non-naturally occurring and can be from either the same or different species. For example, a family can contain a first protein of human origin, as well as other, distinct proteins of human origin or alternatively, can contain homologues of non-human origin, e.g., monkey proteins. Members of a family may also have common functional characteristics.

[0400] For example, the family of TWIK-7 proteins comprises at least one “transmembrane domain” and preferably four transmembrane domains. As used herein, the term “transmembrane domain” includes an amino acid sequence of about 15 amino acid residues in length which spans the plasma membrane. More preferably, a transmembrane domain includes about at least 20, 25, 30, 35, 40, or 45 amino acid residues and spans the plasma membrane. Transmembrane domains are rich in hydrophobic residues, and typically have an alpha-helical structure. In a preferred embodiment, at least 50%, 60%, 70%, 80%, 90%, 95% or more of the amino acids of a transmembrane domain are hydrophobic, e.g., leucines, isoleucines, tyrosines, or tryptophans. Transmembrane domains are described in, for example, Zagotta W. N. et al. (1996) Annual Rev. Neurosci. 19: 235-263, the contents of which are incorporated herein by reference. Amino acid residues 39-60, 144-165, 216-235, and 281-302 of the native TWIK-7 protein are predicted to comprise transmembrane domains (see FIG. 13). Accordingly, TWIK-7 proteins having at least 50-60% homology, preferably about 60-70%, more preferably about 70-80%, or about 80-90% homology with a transmembrane domain of human TWIK-7 are within the scope of the invention.

[0401] In another embodiment, a TWIK-7 molecule of the present invention is identified based on the presence of a Pore loop (P-loop). As used herein, the term “Pore loop” or “P-loop” includes an amino acid sequence of about 15-45 amino acid residues in length, preferably about 15-35 amino acid residues in length, and most preferably about 15-25 amino acid residues in length, which is involved in lining the potassium channel pore. A P-loop is typically found between transmembrane domains of potassium channels and is believed to be a major determinant of ion selectivity in potassium channels. Preferably, P-loops contain a G-[HYDROPHOBIC AMINO ACID]-G sequence, e.g., a GYG, GLG, or GFG sequence. P-loops are described in, for example, Warmke et al. (1991) Science 252:1560-1562; Zagotta W. N. et al., (1996) Annu. Rev. Neurosci. 19:235-63 (Pongs, O. (1993) J. Membr. Biol., 136, 1-8; Heginbotham et al. (1994) Biophys. J. 66,1061-1067; Mackinnon, R. (1995) Neuron, and 14, 889-892; Pascual et al., (1995) Neuron., 14, 1055-1063), the contents of which are incorporated herein by reference. Amino acid residues 119-135 and 247-263 of the human TWIK-7 protein comprise P-loops.

[0402] In another embodiment, a TWIK-7 molecule of the present invention is identified based on the presence of a “potassium channel protein domain” in the protein or corresponding nucleic acid molecule. As used herein, the term “potassium channel protein domain” includes a protein domain having an amino acid sequence of about 50-350 amino acid residues and having a bit score for the alignment of the sequence to the potassium channel protein domain of about 100-350. Preferably, a potassium channel protein domain includes at least about 200-300, or more preferably about 280 amino acid residues, and has a bit score for the alignment of the sequence to the potassium channel protein domain of at least 20, 30, 40, 50, 60, 70, 80, 90, 100, 110, 120, 130, 140, 150, 160, 170, 180, 190, 200, 210, 220, 230, 240, 250 or higher. The potassium channel protein domain has been assigned ProDom entry 129403. To identify the presence of a potassium channel protein domain in a TWIK-7 protein, and make the determination that a protein of interest has a particular profile, the amino acid sequence of the protein is searched against a database of known protein domains (e.g., the ProDom database) using the default parameters (available online through the Institute National de la Recherche Agronomique, France). A search was performed against the ProDom database resulting in the identification of a potassium channel protein domain in the amino acid sequence of human TWIK-7 (SEQ ID NO:15) at about residues 34-313 of SEQ ID NO:15. The results of the search are set forth in FIG. 14.

[0403] In a preferred embodiment, the TWIK-7 molecules of the invention include at least one transmembrane domain, at least one P-loop, and at least one potassium channel protein domain.

[0404] Isolated proteins of the present invention, preferably TWIK-7 proteins, have an amino acid sequence sufficiently identical to the amino acid sequence of SEQ ID NO:15 or are encoded by a nucleotide sequence sufficiently identical to SEQ ID NO:14 or 16. As used herein, the term “sufficiently identical” refers to a first amino acid or nucleotide sequence which contains a sufficient or minimum number of identical or equivalent (e.g., an amino acid residue which has a similar side chain) amino acid residues or nucleotides to a second amino acid or nucleotide sequence such that the first and second amino acid or nucleotide sequences share common structural domains or motifs and/or a common functional activity. For example, amino acid or nucleotide sequences which share common structural domains have at least 30%, 40%, or 50% homology, preferably 60% homology, more preferably 70%-80%, and even more preferably 90-95% homology across the amino acid sequences of the domains and contain at least one and preferably two structural domains or motifs, are defined herein as sufficiently identical. Furthermore, amino acid or nucleotide sequences which share at least 30%, 40%, or 50%, preferably 60%, more preferably 70-80%, or 90-95% homology and share a common functional activity are defined herein as sufficiently identical.

[0405] As used interchangeably herein, an “TWIK-7 activity”, “biological activity of TWIK-7” or “functional activity of TWIK-7”, refers to an activity exerted by a TWIK-7 protein, polypeptide or nucleic acid molecule on a TWIK-7 responsive cell or tissue, or on a TWIK-7 protein substrate, as determined in vivo, or in vitro, according to standard techniques. In one embodiment, a TWIK-7 activity is a direct activity, such as an association with a TWIK-7-target molecule. As used herein, a “target molecule” or “binding partner” is a molecule with which a TWIK-7 protein binds or interacts in nature, such that TWIK-7-mediated function is achieved. A TWIK-7 target molecule can be a non-TWIK-7 molecule or a TWIK-7 protein or polypeptide of the present invention. In an exemplary embodiment, a TWIK-7 target molecule is a TWIK-7 ligand, e.g., a potassium channel pore-forming subunit or a potassium channel ligand. Alternatively, a TWIK-7 activity is an indirect activity, such as a cellular signaling activity mediated by interaction of the TWIK-7 protein with a TWIK-7 ligand. The biological activities of TWIK-7 are described herein. For example, the TWIK-7 proteins of the present invention can have one or more of the following activities: (1) interacting with a non-TWIK protein molecule; (2) activating a TWIK-dependent signal transduction pathway; (3) modulating the release of neurotransmitters; (4) modulating membrane excitability; (5) influencing the resting potential of membranes, wave forms and frequencies of action potentials, and thresholds of excitation, (6) modulating processes which underlie learning and memory, such as integration of sub-threshold synaptic responses and the conductance of back-propagating action potentials, and (7) mediating nociception.

[0406] Accordingly, another embodiment of the invention features isolated TWIK-7 proteins and polypeptides having a TWIK-7 activity. Preferred proteins are TWIK-7 proteins having at least one transmembrane domain, and, preferably, a TWIK-7 activity. Other preferred proteins are TWIK-7 proteins having a P-loop domain and, preferably, a TWIK-7 activity. Other preferred proteins are TWIK-7 proteins having a potassium channel protein domain and, preferably, a TWIK-7 activity. Yet other preferred proteins are TWIK-7 proteins having at least one transmembrane domain, a P-loop domain, and a potassium channel protein domain and, preferably, a TWIK-7 activity.

[0407] Additional preferred proteins have at least one transmembrane domain, and one or more of a P-loop domain and/or a potassium channel protein domain, and are, preferably, encoded by a nucleic acid molecule having a nucleotide sequence which hybridizes under stringent hybridization conditions to a nucleic acid molecule comprising the nucleotide sequence of SEQ ID NO:14 or 16.

[0408] The nucleotide sequence of the isolated human TWIK-7 cDNA and the predicted amino acid sequence of the human TWIK-7 polypeptide are shown in FIGS. 9A-B and in SEQ ID NOs:14 and 15, respectively.

[0409] The human TWIK-7 gene, which is approximately 1943 nucleotides in length, encodes a protein having a molecular weight of approximately 48.7 kD and which is approximately 431 amino acid residues in length.

[0410] Various aspects of the invention are described in further detail in the following subsections:

[0411] I. Isolated Nucleic Acid Molecules

[0412] One aspect of the invention pertains to isolated nucleic acid molecules that encode TWIK-7 proteins or biologically active portions thereof, as well as nucleic acid fragments sufficient for use as hybridization probes to identify TWIK-7-encoding nucleic acid molecules (e.g, TWIK-7 mRNA) and fragments for use as PCR primers for the amplification or mutation of TWIK-7 nucleic acid molecules. As used herein, the term “nucleic acid molecule” is intended to include DNA molecules (e.g., cDNA or genomic DNA) and RNA molecules (e.g., mRNA) and analogs of the DNA or RNA generated using nucleotide analogs. The nucleic acid molecule can be single-stranded or double-stranded, but preferably is double-stranded DNA.

[0413] The term “isolated nucleic acid molecule” includes nucleic acid molecules which are separated from other nucleic acid molecules which are present in the natural source of the nucleic acid. For example, with regards to genomic DNA, the term “isolated” includes nucleic acid molecules which are separated from the chromosome with which the genomic DNA is naturally associated. Preferably, an “isolated” nucleic acid is free of sequences which naturally flank the nucleic acid (i.e., sequences located at the 5′ and 3′ ends of the nucleic acid) in the genomic DNA of the organism from which the nucleic acid is derived. For example, in various embodiments, the isolated TWIK-7 nucleic acid molecule can contain less than about 5 kb, 4 kb, 3 kb, 2 kb, 1 kb, 0.5 kb or 0.1 kb of nucleotide sequences which naturally flank the nucleic acid molecule in genomic DNA of the cell from which the nucleic acid is derived. Moreover, an “isolated” nucleic acid molecule, such as a cDNA molecule, can be substantially free of other cellular material, or culture medium when produced by recombinant techniques, or substantially free of chemical precursors or other chemicals when chemically synthesized.

[0414] A nucleic acid molecule of the present invention, e.g., a nucleic acid molecule having the nucleotide sequence of SEQ ID NO:14 or 16, or a portion thereof, can be isolated using standard molecular biology techniques and the sequence information provided herein. Using all or portion of the nucleic acid sequence of SEQ ID NO:14 or 16 as a hybridization probe, TWIK-7 nucleic acid molecules can be isolated using standard hybridization and cloning techniques (e.g., as described in Sambrook, J., Fritsh, E. F., and Maniatis, T. Molecular Cloning: A Laboratory Manual. 2nd, ed., Cold Spring Harbor Laboratory, Cold Spring Harbor Laboratory Press, Cold Spring Harbor, N.Y., 1989).

[0415] Moreover, a nucleic acid molecule encompassing all or a portion of SEQ ID NO:14 or 16 can be isolated by the polymerase chain reaction (PCR) using synthetic oligonucleotide primers designed based upon the sequence of SEQ ID NO:14 or 16.

[0416] A nucleic acid of the invention can be amplified using cDNA, mRNA or alternatively, genomic DNA, as a template and appropriate oligonucleotide primers according to standard PCR amplification techniques. The nucleic acid so amplified can be cloned into an appropriate vector and characterized by DNA sequence analysis. Furthermore, oligonucleotides corresponding to TWIK-7 nucleotide sequences can be prepared by standard synthetic techniques, e.g., using an automated DNA synthesizer.

[0417] In a preferred embodiment, an isolated nucleic acid molecule of the invention comprises the nucleotide sequence shown in SEQ ID NO:14. The sequence of SEQ ID NO:14 corresponds to the human TWIK-7 cDNA. This cDNA comprises sequences encoding the human TWIK-7 protein (i.e., “the coding region”, from nucleotides 466-1758), as well as 5′ untranslated sequences (nucleotides 1-465) and 3′ untranslated sequences (nucleotides 1759-1943). Alternatively, the nucleic acid molecule can comprise only the coding region of SEQ ID NO:14 (e.g., nucleotides 466-1758, corresponding to SEQ ID NO:16).

[0418] In another preferred embodiment, an isolated nucleic acid molecule of the invention comprises a nucleic acid molecule which is a complement of the nucleotide sequence shown in SEQ ID NO:14 or 16, or a portion of any of these nucleotide sequences. A nucleic acid molecule which is complementary to the nucleotide sequence shown in SEQ ID NO:14 or 16 is one which is sufficiently complementary to the nucleotide sequence shown in SEQ ID NO:14 or 16 such that it can hybridize to the nucleotide sequence shown in SEQ ID NO:14 or 16, thereby forming a stable duplex.

[0419] In still another preferred embodiment, an isolated nucleic acid molecule of the present invention comprises a nucleotide sequence which is at least about 50%, 55%, 60%, 65%, 70%, 73%, 74%, 75%, 80%, 85%, 90%, 95%, 96%, 97%, 98%, 99% or more identical to the entire length of the nucleotide sequence shown in SEQ ID NO:14 or 16, or a portion of any of these nucleotide sequences.

[0420] Moreover, the nucleic acid molecule of the invention can comprise only a portion of the nucleic acid sequence of SEQ ID NO:14 or 16, for example, a fragment which can be used as a probe or primer or a fragment encoding a portion of a TWIK-7 protein, e.g., a biologically active portion of a TWIK-7 protein. The nucleotide sequence determined from the cloning of the TWIK-7 gene allows for the generation of probes and primers designed for use in identifying and/or cloning other TWIK-7 family members, as well as TWIK-7 homologues from other species. The probe/primer typically comprises substantially purified oligonucleotide. The oligonucleotide typically comprises a region of nucleotide sequence that hybridizes under stringent conditions to at least about 12 or 15, preferably about 20 or 25, more preferably about 30, 35, 40, 45, 50, 55, 60, 65, 75, 80, 85, 90, 95, 100, 150, or 200 or more consecutive nucleotides of a sense sequence of SEQ ID NO:14 or 16, of an anti-sense sequence of SEQ ID NO:14 or 16, or of a naturally occurring allelic variant or mutant of SEQ ID NO:14 or 16. In one embodiment, a nucleic acid molecule of the present invention comprises a nucleotide sequence which is greater than 50, 100, 150, 200, 250, 300, 350, 400, 450, 500, 550, 600, 650, 700, 750, 800, 850, 900, 950, 1000, 1050, 1100, 1150, 1200, 1250, 1300, 1350, 1400, 1450, 1500, 1550, 1600, 1650, 1700, 1750, 1800, 1850, 1900, 1910, 1910-1920, 1920-1940 or more nucleotides in length and hybridizes under stringent hybridization conditions to a nucleic acid molecule of SEQ ID NO:14 or 16.

[0421] Probes based on the TWIK-7 nucleotide sequences can be used to detect transcripts or genomic sequences encoding the same or homologous proteins. In preferred embodiments, the probe further comprises a label group attached thereto, e.g., the label group can be a radioisotope, a fluorescent compound, an enzyme, or an enzyme co-factor. Such probes can be used as a part of a diagnostic test kit for identifying cells or tissue which misexpress a TWIK-7 protein, such as by measuring a level of a TWIK-7-encoding nucleic acid in a sample of cells from a subject e.g., detecting TWIK-7 mRNA levels or determining whether a genomic TWIK-7 gene has been mutated or deleted.

[0422] A nucleic acid fragment encoding a “biologically active portion of a TWIK-7 protein” can be prepared by isolating a portion of the nucleotide sequence of SEQ ID NO:14 or 16 which encodes a polypeptide having a TWIK-7 biological activity (the biological activities of the TWIK-7 proteins are described herein), expressing the encoded portion of the TWIK-7 protein (e.g., by recombinant expression in vitro) and assessing the activity of the encoded portion of the TWIK-7 protein.

[0423] The invention further encompasses nucleic acid molecules that differ from the nucleotide sequence shown in SEQ ID NO:14 or 16 due to degeneracy of the genetic code and thus encode the same TWIK-7 proteins as those encoded by the nucleotide sequence shown in SEQ ID NO:14 or 16. In another embodiment, an isolated nucleic acid molecule of the invention has a nucleotide sequence encoding a protein having an amino acid sequence shown in SEQ ID NO:15.

[0424] In addition to the TWIK-7 nucleotide sequences shown in SEQ ID NO:14 or 16, it will be appreciated by those skilled in the art that DNA sequence polymorphisms that lead to changes in the amino acid sequences of the TWIK-7 proteins may exist within a population (e.g., the human population). Such genetic polymorphism in the TWIK-7 genes may exist among individuals within a population due to natural allelic variation. As used herein, the terms “gene” and “recombinant gene” refer to nucleic acid molecules which include an open reading frame encoding a TWIK-7 protein, preferably a mammalian TWIK-7 protein, and can further include non-coding regulatory sequences, and introns.

[0425] Allelic variants of human TWIK-7 include both functional and non-functional TWIK-7 proteins. Functional allelic variants are naturally occurring amino acid sequence variants of the human TWIK-7 protein that maintain the ability to bind a TWIK-7 ligand or substrate and/or modulate cell proliferation and/or migration mechanisms. Functional allelic variants will typically contain only conservative substitution of one or more amino acids of SEQ ID NO:15, or substitution, deletion or insertion of non-critical residues in non-critical regions of the protein.

[0426] Non-functional allelic variants are naturally occurring amino acid sequence variants of the human TWIK-7 protein that do not have the ability to either bind a TWIK-7 ligand and/or modulate any of the TWIK-7 activities described herein. Non-functional allelic variants will typically contain a non-conservative substitution, a deletion, or insertion or premature truncation of the amino acid sequence of SEQ ID NO:15, or a substitution, insertion or deletion in critical residues or critical regions.

[0427] The present invention further provides non-human orthologues of the human TWIK-7 protein. Orthologues of the human TWIK-7 protein are proteins that are isolated from non-human organisms and possess the same TWIK-7 ligand binding and/or modulation of membrane excitability activities of the human TWIK-7 protein. Orthologues of the human TWIK-7 protein can readily be identified as comprising an amino acid sequence that is substantially identical to SEQ ID NO:15.

[0428] Moreover, nucleic acid molecules encoding other TWIK-7 family members and, thus, which have a nucleotide sequence which differs from the TWIK-7 sequences of SEQ ID NO:14 or 16 are intended to be within the scope of the invention. For example, another TWIK-7 cDNA can be identified based on the nucleotide sequence of human TWIK-7. Moreover, nucleic acid molecules encoding TWIK-7 proteins from different species, and which, thus, have a nucleotide sequence which differs from the TWIK-7 sequences of SEQ ID NO:14 or 16 are intended to be within the scope of the invention. For example, a mouse TWIK-7 cDNA can be identified based on the nucleotide sequence of a human TWIK-7.

[0429] Nucleic acid molecules corresponding to natural allelic variants and homologues of the TWIK-7 cDNAs of the invention can be isolated based on their homology to the TWIK-7 nucleic acids disclosed herein using the cDNAs disclosed herein, or a portion thereof, as a hybridization probe according to standard hybridization techniques under stringent hybridization conditions. Nucleic acid molecules corresponding to natural allelic variants and homologues of the TWIK-7 cDNAs of the invention can further be isolated by mapping to the same chromosome or locus as the TWIK-7 gene.

[0430] Accordingly, in another embodiment, an isolated nucleic acid molecule of the invention is at least 15, 20, 25, 30 or more nucleotides in length and hybridizes under stringent conditions to the nucleic acid molecule comprising the nucleotide sequence of SEQ ID NO:14 or 16. In other embodiment, the nucleic acid is at least 1910, 1910-1920, 1920-1940, or more nucleotides in length. As used herein, the termn “hybridizes under stringent conditions” is intended to describe conditions for hybridization and washing under which nucleotide sequences at least 60% identical to each other typically remain hybridized to each other. Preferably, the conditions are such that sequences at least about 70%, more preferably at least about 80%, even more preferably at least about 85% or 90% identical to each other typically remain hybridized to each other. Such stringent conditions are known to those skilled in the art and can be found in Current Protocols in Molecular Biology, John Wiley & Sons, N.Y. (1989), 6.3.1-6.3.6. A preferred, non-limiting example of stringent hybridization conditions are hybridization in 6×sodium chloride/sodium citrate (SSC) at about 45° C., followed by one or more washes in 0.2×SSC, 0.1% SDS at 50° C., preferably at 55° C., more preferably at 60° C., and even more preferably at 65° C. Preferably, an isolated nucleic acid molecule of the invention that hybridizes under stringent conditions to the sequence of SEQ ID NO:14 or 16 and corresponds to a naturally-occurring nucleic acid molecule. As used herein, a “naturally-occurring” nucleic acid molecule refers to an RNA or DNA molecule having a nucleotide sequence that occurs in nature (e.g., encodes a natural protein).

[0431] In addition to naturally-occurring allelic variants of the TWIK-7 sequences that may exist in the population, the skilled artisan will further appreciate that changes can be introduced by mutation into the nucleotide sequences of SEQ ID NO:14 or 16, thereby leading to changes in the amino acid sequence of the encoded TWIK-7 proteins, without altering the functional ability of the TWIK-7 proteins. For example, nucleotide substitutions leading to amino acid substitutions at “non-essential” amino acid residues can be made in the sequence of SEQ ID NO:14 or 16. A “non-essential” amino acid residue is a residue that can be altered from the wild-type sequence of TWIK-7 (e.g., the sequence of SEQ ID NO:15) without altering the biological activity, whereas an “essential” amino acid residue is required for biological activity. For example, amino acid residues that are conserved among the TWIK-7 proteins of the present invention, e.g., those present in a transmembrane domain, are predicted to be particularly unamenable to alteration. Furthermore, additional amino acid residues that are conserved between the TWIK-7 proteins of the present invention and other members of the TWIK family are not likely to be amenable to alteration.

[0432] Accordingly, another aspect of the invention pertains to nucleic acid molecules encoding TWIK-7 proteins that contain changes in amino acid residues that are not essential for activity. Such TWIK-7 proteins differ in amino acid sequence from SEQ ID NO:15, yet retain biological activity. In one embodiment, the isolated nucleic acid molecule comprises a nucleotide sequence encoding a protein, wherein the protein comprises an amino acid sequence at least about 50%, 55%, 60%, 65%, 67%, 68%, 70%, 75%, 80%, 85%, 90%, 95%, 96%, 97%, 98%, 99% or more identical to SEQ ID NO:15.

[0433] An isolated nucleic acid molecule encoding a TWIK-7 protein identical to the protein of SEQ ID NO:15, can be created by introducing one or more nucleotide substitutions, additions or deletions into the nucleotide sequence of SEQ ID NO:14 or 16, such that one or more amino acid substitutions, additions or deletions are introduced into the encoded protein. Mutations can be introduced into SEQ ID NO:14 or 16 by standard techniques, such as site-directed mutagenesis and PCR-mediated mutagenesis. Preferably, conservative amino acid substitutions are made at one or more predicted non-essential amino acid residues. A “conservative amino acid substitution” is one in which the amino acid residue is replaced with an amino acid residue having a similar side chain. Families of amino acid residues having similar side chains have been defined in the art. These families include amino acids with basic side chains (e.g., lysine, arginine, histidine), acidic side chains (e.g., aspartic acid, glutamic acid), uncharged polar side chains (e.g., glycine, asparagine, glutamine, serine, threonine, tyrosine, cysteine), nonpolar side chains (e.g., alanine, valine, leucine, isoleucine, proline, phenylalanine, methionine, tryptophan), beta-branched side chains (e.g., threonine, valine, isoleucine) and aromatic side chains (e.g., tyrosine, phenylalanine, tryptophan, histidine). Thus, a predicted nonessential amino acid residue in a TWIK-7 protein is preferably replaced with another amino acid residue from the same side chain family. Alternatively, in another embodiment, mutations can be introduced randomly along all or part of a TWIK-7 coding sequence, such as by saturation mutagenesis, and the resultant mutants can be screened for TWIK-7 biological activity to identify mutants that retain activity. Following mutagenesis of SEQ ID NO:14 or 16, the encoded protein can be expressed recombinantly and the activity of the protein can be determined.

[0434] In a preferred embodiment, a mutant TWIK-7 protein can be assayed for the ability to (1) interact with a non-TWIK protein molecule; (2) activate a TWIK-dependent signal transduction pathway; (3) modulate the release of neurotransmitters; (4) modulate membrane excitability; (5) influence the resting potential of membranes, wave forms and frequencies of action potentials, and thresholds of excitation, (6) modulate processes which underlie learning and memory, such as integration of sub-threshold synaptic responses and the conductance of back-propagating action potentials, and (7) mediate nociception.

[0435] In addition to the nucleic acid molecules encoding TWIK-7 proteins described above, another aspect of the invention pertains to isolated nucleic acid molecules which are antisense thereto. An “antisense” nucleic acid comprises a nucleotide sequence which is complementary to a “sense” nucleic acid encoding a protein, e.g., complementary to the coding strand of a double-stranded cDNA molecule or complementary to an mRNA sequence. Accordingly, an antisense nucleic acid can hydrogen bond to a sense nucleic acid. The antisense nucleic acid can be complementary to an entire TWIK-7 coding strand, or to only a portion thereof. In one embodiment, an antisense nucleic acid molecule is antisense to a “coding region” of the coding strand of a nucleotide sequence encoding TWIK-7. The term “coding region” refers to the region of the nucleotide sequence comprising codons which are translated into amino acid residues (e.g., the coding region of human TWIK-7 corresponds to SEQ ID NO:16). In another embodiment, the antisense nucleic acid molecule is antisense to a “noncoding region” of the coding strand of a nucleotide sequence encoding TWIK-7. The term “noncoding region” refers to 5′ and 3′ sequences which flank the coding region that are not translated into amino acids (i.e., also referred to as 5′ and 3′ untranslated regions).

[0436] Given the coding strand sequences encoding TWIK-7 disclosed herein (e.g., SEQ ID NO:16), antisense nucleic acids of the invention can be designed according to the rules of Watson and Crick base pairing. The antisense nucleic acid molecule can be complementary to the entire coding region of TWIK-7 mRNA, but more preferably is an oligonucleotide which is antisense to only a portion of the coding or noncoding region of TWIK-7 mRNA. For example, the antisense oligonucleotide can be complementary to the region surrounding the translation start site of TWIK-7 mRNA. An antisense oligonucleotide can be, for example, about 5, 10, 15, 20, 25, 30, 35, 40, 45 or 50 nucleotides in length. An antisense nucleic acid of the invention can be constructed using chemical synthesis and enzymatic ligation reactions using procedures known in the art. For example, an antisense nucleic acid (e.g., an antisense oligonucleotide) can be chemically synthesized using naturally occurring nucleotides or variously modified nucleotides designed to increase the biological stability of the molecules or to increase the physical stability of the duplex formed between the antisense and sense nucleic acids, e.g., phosphorothioate derivatives and acridine substituted nucleotides can be used. Examples of modified nucleotides which can be used to generate the antisense nucleic acid include 5-fluorouracil, 5-bromouracil, 5-chlorouracil, 5-iodouracil, hypoxanthine, xantine, 4-acetylcytosine, 5-(carboxyhydroxylmethyl) uracil, 5-carboxymethylaminomethyl-2-thiouridine, 5-carboxymethylaminomethyluracil, dihydrouracil, beta-D-galactosylqueosine, inosine, N6-isopentenyladenine, 1-methylguanine, 1-methylinosine, 2,2-dimethylguanine, 2-methyladenine, 2-methylguanine, 3-methylcytosine, 5-methylcytosine, N6-adenine, 7-methylguanine, 5-methylaminomethyluracil, 5-methoxyaminomethyl-2-thiouracil, beta-D-mannosylqueosine, 5′-methoxycarboxymethyluracil, 5-methoxyuracil, 2-methylthio-N6-isopentenyladenine, uracil-5-oxyacetic acid (v), wybutoxosine, pseudouracil, queosine, 2-thiocytosine, 5-methyl-2-thiouracil, 2-thiouracil, 4-thiouracil, 5-methyluracil, uracil-5-oxyacetic acid methylester, uracil-5-oxyacetic acid (v), 5-methyl-2-thiouracil, 3-(3-amino-3-N-2-carboxypropyl) uracil, (acp3)w, and 2,6-diaminopurine. Alternatively, the antisense nucleic acid can be produced biologically using an expression vector into which a nucleic acid has been subcloned in an antisense orientation (i.e., RNA transcribed from the inserted nucleic acid will be of an antisense orientation to a target nucleic acid of interest, described further in the following subsection).

[0437] The antisense nucleic acid molecules of the invention are typically administered to a subject or generated in situ such that they hybridize with or bind to cellular mRNA and/or genomic DNA encoding a TWIK-7 protein to thereby inhibit expression of the protein, e.g., by inhibiting transcription and/or translation. The hybridization can be by conventional nucleotide complementarity to form a stable duplex, or, for example, in the case of an antisense nucleic acid molecule which binds to DNA duplexes, through specific interactions in the major groove of the double helix. An example of a route of administration of antisense nucleic acid molecules of the invention include direct injection at a tissue site. Alternatively, antisense nucleic acid molecules can be modified to target selected cells and then administered systemically. For example, for systemic administration, antisense molecules can be modified such that they specifically bind to receptors or antigens expressed on a selected cell surface, e.g., by linking the antisense nucleic acid molecules to peptides or antibodies which bind to cell surface receptors or antigens. The antisense nucleic acid molecules can also be delivered to cells using the vectors described herein. To achieve sufficient intracellular concentrations of the antisense molecules, vector constructs in which the antisense nucleic acid molecule is placed under the control of a strong pol II or pol III promoter are preferred.

[0438] In yet another embodiment, the antisense nucleic acid molecule of the invention is an α-anomeric nucleic acid molecule. An α-anomeric nucleic acid molecule forms specific double-stranded hybrids with complementary RNA in which, contrary to the usual β-units, the strands run parallel to each other (Gaultier et al. (1987) Nucleic Acids. Res. 15:6625-6641). The antisense nucleic acid molecule can also comprise a 2′-o-methylribonucleotide (Inoue et al. (1987) Nucleic Acids Res. 15:6131-6148) or a chimeric RNA-DNA analogue (Inoue et al. (1987) FEBS Lett. 215:327-330).

[0439] In still another embodiment, an antisense nucleic acid of the invention is a ribozyme. Ribozymes are catalytic RNA molecules with ribonuclease activity which are capable of cleaving a single-stranded nucleic acid, such as an mRNA, to which they have a complementary region. Thus, ribozymes (e.g., hammerhead ribozymes (described in Haseloff and Gerlach (1988) Nature 334:585-591)) can be used to catalytically cleave TWIK-7 mRNA transcripts to thereby inhibit translation of TWIK-7 mRNA. A ribozyme having specificity for a TWIK-7-encoding nucleic acid can be designed based upon the nucleotide sequence of a TWIK-7 cDNA disclosed herein (i.e., SEQ ID NO:14 or 16). For example, a derivative of a Tetrahymena L-19 IVS RNA can be constructed in which the nucleotide sequence of the active site is complementary to the nucleotide sequence to be cleaved in a TWIK-7-encoding mRNA. See, e.g., Cech et al. U.S. Pat. No. 4,987,071; and Cech et al. U.S. Pat. No. 5,116,742. Alternatively, TWIK-7 mRNA can be used to select a catalytic RNA having a specific ribonuclease activity from a pool of RNA molecules. See, e.g., Bartel, D. and Szostak, J. W. (1993) Science 261:1411-1418.

[0440] Alternatively, TWIK-7 gene expression can be inhibited by targeting nucleotide sequences complementary to the regulatory region of the TWIK-7 (e.g., the TWIK-7 promoter and/or enhancers; e.g., nucleotides 1-465 of SEQ ID NO:14) to form triple helical structures that prevent transcription of the TWIK-7 gene in target cells. See generally, Helene, C. (1991) Anticancer Drug Des. 6(6):569-84; Helene, C. et al. (1992) Ann. N.Y. Acad. Sci. 660:27-36; and Maher, L. J. (1992) Bioassays 14(12):807-15.

[0441] In yet another embodiment, the TWIK-7 nucleic acid molecules of the present invention can be modified at the base moiety, sugar moiety or phosphate backbone to improve, e.g., the stability, hybridization, or solubility of the molecule. For example, the deoxyribose phosphate backbone of the nucleic acid molecules can be modified to generate peptide nucleic acids (see Hyrup B. et al. (1996) Bioorganic & Medicinal Chemistry 4 (1): 5-23). As used herein, the terms “peptide nucleic acids” or “PNAs” refer to nucleic acid mimics, e.g., DNA mimics, in which the deoxyribose phosphate backbone is replaced by a pseudopeptide backbone and only the four natural nucleobases are retained. The neutral backbone of PNAs has been shown to allow for specific hybridization to DNA and RNA under conditions of low ionic strength. The synthesis of PNA oligomers can be performed using standard solid phase peptide synthesis protocols as described in Hyrup B. et al. (1996) supra; Perry-O'Keefe et al. Proc. Natl. Acad Sci. 93: 14670-675.

[0442] PNAs of TWIK-7 nucleic acid molecules can be used in therapeutic and diagnostic applications. For example, PNAs can be used as antisense or antigene agents for sequence-specific modulation of gene expression by, for example, inducing transcription or translation arrest or inhibiting replication. PNAs of TWIK-7 nucleic acid molecules can also be used in the analysis of single base pair mutations in a gene, (e.g., by PNA-directed PCR clamping); as ‘artificial restriction enzymes’ when used in combination with other enzymes, (e.g., S1 nucleases (Hyrup B. (1996) supra)); or as probes or primers for DNA sequencing or hybridization (Hyrup B. et al. (1996) supra; Perry-O'Keefe supra).

[0443] In another embodiment, PNAs of TWIK-7 can be modified, (e.g., to enhance their stability or cellular uptake), by attaching lipophilic or other helper groups to PNA, by the formation of PNA-DNA chimeras, or by the use of liposomes or other techniques of drug delivery known in the art. For example, PNA-DNA chimeras of TWIK-7 nucleic acid molecules can be generated which may combine the advantageous properties of PNA and DNA. Such chimeras allow DNA recognition enzymes, (e.g., RNAse H and DNA polymerases), to interact with the DNA portion while the PNA portion would provide high binding affinity and specificity. PNA-DNA chimeras can be linked using linkers of appropriate lengths selected in terms of base stacking, number of bonds between the nucleobases, and orientation (Hyrup B. (1996) supra). The synthesis of PNA-DNA chimeras can be performed as described in Hyrup B. (1996) supra and Finn P. J. et al. (1996) Nucleic Acids Res. 24 (17): 3357-63. For example, a DNA chain can be synthesized on a solid support using standard phosphoramidite coupling chemistry and modified nucleoside analogs, e.g., 5′-(4-methoxytrityl)amino-5′-deoxy-thymidine phosphoramidite, can be used between the PNA and the 5′ end of DNA (Mag, M. et al. (1989) Nucleic Acid Res. 17: 5973-88). PNA monomers are then coupled in a stepwise manner to produce a chimeric molecule with a 5′ PNA segment and a 3′ DNA segment (Finn P. J. et al. (1996) supra). Alternatively, chimeric molecules can be synthesized with a 5′ DNA segment and a 3′ PNA segment (Peterser, K. H. et al. (1975) Bioorganic Med Chem. Lett. 5: 1119-11124).

[0444] In other embodiments, the oligonucleotide may include other appended groups such as peptides (e.g., for targeting host cell receptors in vivo), or agents facilitating transport across the cell membrane (see, e.g., Letsinger et al. (1989) Proc. Natl. Acad. Sci. USA 86:6553-6556; Lemaitre et al. (1987) Proc. Natl. Acad. Sci. USA 84:648-652; PCT Publication No. W088/09810) or the blood-brain barrier (see, e.g., PCT Publication No. W089/10134). In addition, oligonucleotides can be modified with hybridization-triggered cleavage agents (See, e.g., Krol et al. (1988) Bio-Techniques 6:958-976) or intercalating agents. (See, e.g., Zon (1988) Pharm. Res. 5:539-549). To this end, the oligonucleotide may be conjugated to another molecule, (e.g., a peptide, hybridization triggered cross-linking agent, transport agent, or hybridization-triggered cleavage agent).

[0445] Alternatively, the expression characteristics of an endogenous TWIK-7 gene within a cell line or microorganism may be modified by inserting a heterologous DNA regulatory element into the genome of a stable cell line or cloned microorganism such that the inserted regulatory element is operatively linked with the endogenous TWIK-7 gene. For example, an endogenous TWIK-7 gene which is normally “transcriptionally silent”, i.e., a TWIK-7 gene which is normally not expressed, or is expressed only at very low levels in a cell line or microorganism, may be activated by inserting a regulatory element which is capable of promoting the expression of a normally expressed gene product in that cell line or microorganism. Alternatively, a transcriptionally silent, endogenous TWIK-7 gene may be activated by insertion of a promiscuous regulatory element that works across cell types.

[0446] A heterologous regulatory element may be inserted into a stable cell line or cloned microorganism, such that it is operatively linked with an endogenous TWIK-7 gene, using techniques, such as targeted homologous recombination, which are well known to those of skill in the art, and described, e.g., in Chappel, U.S. Pat. No. 5,272,071; PCT publication No. WO 91/06667, published May 16, 1991.

[0447] II. Isolated TWIK-7 Proteins and Anti-TWIK-7 Antibodies

[0448] One aspect of the invention pertains to isolated TWIK-7 proteins, and biologically active portions thereof, as well as polypeptide fragments suitable for use as immunogens to raise anti-TWIK-7 antibodies. In one embodiment, native TWIK-7 proteins can be isolated from cells or tissue sources by an appropriate purification scheme using standard protein purification techniques. In another embodiment, TWIK-7 proteins are produced by recombinant DNA techniques. Alternative to recombinant expression, a TWIK-7 protein or polypeptide can be synthesized chemically using standard peptide synthesis techniques.

[0449] An “isolated” or “purified” protein or biologically active portion thereof is substantially free of cellular material or other contaminating proteins from the cell or tissue source from which the TWIK-7 protein is derived, or substantially free from chemical precursors or other chemicals when chemically synthesized. The language “substantially free of cellular material” includes preparations of TWIK-7 protein in which the protein is separated from cellular components of the cells from which it is isolated or recombinantly produced. In one embodiment, the language “substantially free of cellular material” includes preparations of TWIK-7 protein having less than about 30% (by dry weight) of non-TWIK-7 protein (also referred to herein as a “contaminating protein”), more preferably less than about 20% of non-TWIK-7 protein, still more preferably less than about 10% of non-TWIK-7 protein, and most preferably less than about 5% non-TWIK-7 protein. When the TWIK-7 protein or biologically active portion thereof is recombinantly produced, it is also preferably substantially free of culture medium, i.e., culture medium represents less than about 20%, more preferably less than about 10%, and most preferably less than about 5% of the volume of the protein preparation.

[0450] The language “substantially free of chemical precursors or other chemicals” includes preparations of TWIK-7 protein in which the protein is separated from chemical precursors or other chemicals which are involved in the synthesis of the protein. In one embodiment, the language “substantially free of chemical precursors or other chemicals” includes preparations of TWIK-7 protein having less than about 30% (by dry weight) of chemical precursors or non-TWIK-7 chemicals, more preferably less than about 20% chemical precursors or non-TWIK-7 chemicals, still more preferably less than about 10% chemical precursors or non-TWIK-7 chemicals, and most preferably less than about 5% chemical precursors or non-TWIK-7 chemicals.

[0451] As used herein, a “biologically active portion” of a TWIK-7 protein includes a fragment of a TWIK-7 protein which participates in an interaction between a TWIK-7 molecule and a non-TWIK-7 molecule. Biologically active portions of a TWIK-7 protein include peptides comprising amino acid sequences sufficiently identical to or derived from the amino acid sequence of the TWIK-7 protein, e.g., the amino acid sequence shown in SEQ ID NO:15, which include less amino acids than the full length TWIK-7 proteins, and exhibit at least one activity of a TWIK-7 protein. Typically, biologically active portions comprise a domain or motif with at least one activity of the TWIK-7 protein, e.g., modulating membrane excitability. A biologically active portion of a TWIK-7 protein can be a polypeptide which is, for example, 25, 30, 35, 40, 45, 50, 75, 100, 125, 150, 175, 200 or more amino acids in length. Biologically active portions of a TWIK-7 protein can be used as targets for developing agents which modulate a TWIK-7 mediated activity, e.g., modulation of membrane excitability.

[0452] In one embodiment, a biologically active portion of a TWIK-7 protein comprises at least one transmembrane domain. It is to be understood that a preferred biologically active portion of a TWIK-7 protein of the present invention may contain at least one transmembrane domain and a potassium channel protein domain. Moreover, other biologically active portions, in which other regions of the protein are deleted, can be prepared by recombinant techniques and evaluated for one or more of the functional activities of a native TWIK-7 protein.

[0453] In a preferred embodiment, the TWIK-7 protein has an amino acid sequence shown in SEQ ID NO:15. In other embodiments, the TWIK-7 protein is substantially identical to SEQ ID NO:15, and retains the functional activity of the protein of SEQ ID NO:15, yet differs in amino acid sequence due to natural allelic variation or mutagenesis, as described in detail in subsection I above. Accordingly, in another embodiment, the TWIK-7 protein is a protein which comprises an amino acid sequence at least about 50%, 55%, 60%, 65%, 67%, 68%, 70%, 75%, 80%, 85%, 90%, 95%, 96%, 97%, 98%, 99% or more identical to SEQ ID NO:15.

[0454] To determine the percent identity of two amino acid sequences or of two nucleic acid sequences, the sequences are aligned for optimal comparison purposes (e.g., gaps can be introduced in one or both of a first and a second amino acid or nucleic acid sequence for optimal alignment and non-identical sequences can be disregarded for comparison purposes). In a preferred embodiment, the length of a reference sequence aligned for comparison purposes is at least 30%, preferably at least 40%, more preferably at least 50%, even more preferably at least 60%, and even more preferably at least 70%, 80%, or 90% of the length of the reference sequence (e.g., when aligning a second sequence to the TWIK-7 amino acid sequence of SEQ ID NO:15 having 220 amino acid residues, at least 50, preferably at least 100, more preferably at least 150, even more preferably at least 175, and even more preferably at least 200 or more amino acid residues are aligned). The amino acid residues or nucleotides at corresponding amino acid positions or nucleotide positions are then compared. When a position in the first sequence is occupied by the same amino acid residue or nucleotide as the corresponding position in the second sequence, then the molecules are identical at that position (as used herein amino acid or nucleic acid “identity” is equivalent to amino acid or nucleic acid “homology”). The percent identity between the two sequences is a function of the number of identical positions shared by the sequences, taking into account the number of gaps, and the length of each gap, which need to be introduced for optimal alignment of the two sequences.

[0455] The comparison of sequences and determination of percent identity between two sequences can be accomplished using a mathematical algorithm. In a preferred embodiment, the percent identity between two amino acid sequences is determined using the Needleman and Wunsch (J. Mol. Biol (48):444-453 (1970)) algorithm which has been incorporated into the GAP program in the GCG software package (available online through the Genetics Computer Group), using either a Blosum 62 matrix or a PAM250 matrix, and a gap weight of 16, 14, 12, 10, 8, 6, or 4 and a length weight of 1, 2, 3, 4, 5, or 6. In yet another preferred embodiment, the percent identity between two nucleotide sequences is determined using the GAP program in the GCG software package (available online through the Genetics Computer Group), using a NWSgapdna.CMP matrix and a gap weight of 40, 50, 60, 70, or 80 and a length weight of 1, 2, 3, 4, 5, or 6. In another embodiment, the percent identity between two amino acid or nucleotide sequences is determined using the algorithm of E. Meyers and W. Miller (CABIOS, 4:11-17 (1989)) which has been incorporated into the ALIGN program (version 2.0), using a PAM120 weight residue table, a gap length penalty of 12 and a gap penalty of 4.

[0456] The nucleic acid and protein sequences of the present invention can further be used as a “query sequence” to perform a search against public databases to, for example, identify other family members or related sequences. Such searches can be performed using the NBLAST and XBLAST programs (version 2.0) of Altschul, et al. (1990) J. Mol. Biol. 215:403-10. BLAST nucleotide searches can be performed with the NBLAST program, score=100, wordlength=12 to obtain nucleotide sequences homologous to TWIK-7 nucleic acid molecules of the invention. BLAST protein searches can be performed with the XBLAST program, score=100, wordlength=3 to obtain amino acid sequences homologous to TWIK-7 protein molecules of the invention. To obtain gapped alignments for comparison purposes, Gapped BLAST can be utilized as described in Altschul et al., (1997) Nucleic Acids Res. 25(17):3389-3402. When utilizing BLAST and Gapped BLAST programs, the default parameters of the respective programs (e.g., XBLAST and NBLAST) can be used. See the website for the National Center for Biotechnology Information.

[0457] The invention also provides TWIK-7 chimeric or fusion proteins. As used herein, a TWIK-7 “chimeric protein” or “fusion protein” comprises a TWIK-7 polypeptide operatively linked to a non-TWIK-7 polypeptide. An “TWIK-7 polypeptide” refers to a polypeptide having an amino acid sequence corresponding to TWIK-7, whereas a “non-TWIK-7 polypeptide” refers to a polypeptide having an amino acid sequence corresponding to a protein which is not substantially homologous to the TWIK-7 protein, e.g., a protein which is different from the TWIK-7 protein and which is derived from the same or a different organism. Within a TWIK-7 fusion protein the TWIK-7 polypeptide can correspond to all or a portion of a TWIK-7 protein. In a preferred embodiment, a TWIK-7 fusion protein comprises at least one biologically active portion of a TWIK-7 protein. In another preferred embodiment, a TWIK-7 fusion protein comprises at least two biologically active portions of a TWIK-7 protein. Within the fusion protein, the term “operatively linked” is intended to indicate that the TWIK-7 polypeptide and the non-TWIK-7 polypeptide are fused in-frame to each other. The non-TWIK-7 polypeptide can be fused to the N-terminus or C-terminus of the TWIK-7 polypeptide.

[0458] For example, in one embodiment, the fusion protein is a GST-TWIK-7 fusion protein in which the TWIK-7 sequences are fused to the C-terminus of the GST sequences. Such fusion proteins can facilitate the purification of recombinant TWIK-7.

[0459] In another embodiment, the fusion protein is a TWIK-7 protein containing a heterologous signal sequence at its N-terminus. In certain host cells (e.g., mammalian host cells), expression and/or secretion of TWIK-7 can be increased through use of a heterologous signal sequence.

[0460] The TWIK-7 fusion proteins of the invention can be incorporated into pharmaceutical compositions and administered to a subject in vivo. The TWIK-7 fusion proteins can be used to affect the bioavailability of a TWIK-7 substrate. Use of TWIK-7 fusion proteins may be useful therapeutically for the treatment of disorders caused by, for example, (i) aberrant modification or mutation of a gene encoding a TWIK-7 protein; (ii) mis-regulation of the TWIK-7 gene; and (iii) aberrant post-translational modification of a TWIK-7 protein.

[0461] Moreover, the TWIK-7-fusion proteins of the invention can be used as immunogens to produce anti-TWIK-7 antibodies in a subject, to purify TWIK-7 ligands and in screening assays to identify molecules which inhibit the interaction of TWIK-7 with a TWIK-7 substrate.

[0462] Preferably, a TWIK-7 chimeric or fusion protein of the invention is produced by standard recombinant DNA techniques. For example, DNA fragments coding for the different polypeptide sequences are ligated together in-frame in accordance with conventional techniques, for example by employing blunt-ended or stagger-ended termini for ligation, restriction enzyme digestion to provide for appropriate termini, filling-in of cohesive ends as appropriate, alkaline phosphatase treatment to avoid undesirable joining, and enzymatic ligation. In another embodiment, the fusion gene can be synthesized by conventional techniques including automated DNA synthesizers. Alternatively, PCR amplification of gene fragments can be carried out using anchor primers which give rise to complementary overhangs between two consecutive gene fragments which can subsequently be annealed and reamplified to generate a chimeric gene sequence (see, for example, Current Protocols in Molecular Biology, eds. Ausubel et al. John Wiley & Sons: 1992). Moreover, many expression vectors are commercially available that already encode a fusion moiety (e.g., a GST polypeptide). A TWIK-7-encoding nucleic acid can be cloned into such an expression vector such that the fusion moiety is linked in-frame to the TWIK-7 protein.

[0463] The present invention also pertains to variants of the TWIK-7 proteins which function as either TWIK-7 agonists (mimetics) or as TWIK-7 antagonists. Variants of the TWIK-7 proteins can be generated by mutagenesis, e.g., discrete point mutation or truncation of a TWIK-7 protein. An agonist of the TWIK-7 proteins can retain substantially the same, or a subset, of the biological activities of the naturally occurring form of a TWIK-7 protein. An antagonist of a TWIK-7 protein can inhibit one or more of the activities of the naturally occurring form of the TWIK-7 protein by, for example, competitively modulating a TWIK-7-mediated activity of a TWIK-7 protein. Thus, specific biological effects can be elicited by treatment with a variant of limited function. In one embodiment, treatment of a subject with a variant having a subset of the biological activities of the naturally occurring form of the protein has fewer side effects in a subject relative to treatment with the naturally occurring form of the TWIK-7 protein.

[0464] In one embodiment, variants of a TWIK-7 protein which function as either TWIK-7 agonists (mimetics) or as TWIK-7 antagonists can be identified by screening combinatorial libraries of mutants, e.g., truncation mutants, of a TWIK-7 protein for TWIK-7 protein agonist or antagonist activity. In one embodiment, a variegated library of TWIK-7 variants is generated by combinatorial mutagenesis at the nucleic acid level and is encoded by a variegated gene library. A variegated library of TWIK-7 variants can be produced by, for example, enzymatically ligating a mixture of synthetic oligonucleotides into gene sequences such that a degenerate set of potential TWIK-7 sequences is expressible as individual polypeptides, or alternatively, as a set of larger fusion proteins (e.g., for phage display) containing the set of TWIK-7 sequences therein. There are a variety of methods which can be used to produce libraries of potential TWIK-7 variants from a degenerate oligonucleotide sequence. Chemical synthesis of a degenerate gene sequence can be performed in an automatic DNA synthesizer, and the synthetic gene then ligated into an appropriate expression vector. Use of a degenerate set of genes allows for the provision, in one mixture, of all of the sequences encoding the desired set of potential TWIK-7 sequences. Methods for synthesizing degenerate oligonucleotides are known in the art (see, e.g., Narang, S. A. (1983) Tetrahedron 39:3; Itakura et al. (1984) Annu. Rev. Biochem. 53:323; Itakura et al. (1984) Science 198:1056; Ike et al. (1983) Nucleic Acid Res. 11:477.

[0465] In addition, libraries of fragments of a TWIK-7 protein coding sequence can be used to generate a variegated population of TWIK-7 fragments for screening and subsequent selection of variants of a TWIK-7 protein. In one embodiment, a library of coding sequence fragments can be generated by treating a double stranded PCR fragment of a TWIK-7 coding sequence with a nuclease under conditions wherein nicking occurs only about once per molecule, denaturing the double stranded DNA, renaturing the DNA to form double stranded DNA which can include sense/antisense pairs from different nicked products, removing single stranded portions from reformed duplexes by treatment with S1 nuclease, and ligating the resulting fragment library into an expression vector. By this method, an expression library can be derived which encodes N-terminal, C-terminal and internal fragments of various sizes of the TWIK-7 protein.

[0466] Several techniques are known in the art for screening gene products of combinatorial libraries made by point mutations or truncation, and for screening cDNA libraries for gene products having a selected property. Such techniques are adaptable for rapid screening of the gene libraries generated by the combinatorial mutagenesis of TWIK-7 proteins. The most widely used techniques, which are amenable to high through-put analysis, for screening large gene libraries typically include cloning the gene library into replicable expression vectors, transforming appropriate cells with the resulting library of vectors, and expressing the combinatorial genes under conditions in which detection of a desired activity facilitates isolation of the vector encoding the gene whose product was detected. Recursive ensemble mutagenesis (REM), a new technique which enhances the frequency of functional mutants in the libraries, can be used in combination with the screening assays to identify TWIK-7 variants (Arkin and Youvan (1992) Proc. Natl. Acad. Sci. USA 89:7811-7815; Delagrave et al. (1993) Protein Engineering 6(3): 327-331).

[0467] In one embodiment, cell based assays can be exploited to analyze a variegated TWIK-7 library. For example, a library of expression vectors can be transfected into a cell line, e.g, a neuronal cell line, which ordinarily responds to a TWIK-7 ligand in a particular TWIK-7 ligand-dependent manner. The transfected cells are then contacted with a TWIK-7 ligand and the effect of expression of the mutant on, e.g., membrane excitability of TWIK-7 can be detected. Plasmid DNA can then be recovered from the cells which score for inhibition, or alternatively, potentiation of signaling by the TWIK-7 ligand, and the individual clones further characterized.

[0468] An isolated TWIK-7 protein, or a portion or fragment thereof, can be used as an immunogen to generate antibodies that bind TWIK-7 using standard techniques for polyclonal and monoclonal antibody preparation. A full-length TWIK-7 protein can be used or, alternatively, the invention provides antigenic peptide fragments of TWIK-7 for use as immunogens. The antigenic peptide of TWIK-7 comprises at least 8 amino acid residues of the amino acid sequence shown in SEQ ID NO:15 and encompasses an epitope of TWIK-7 such that an antibody raised against the peptide forms a specific immune complex with TWIK-7. Preferably, the antigenic peptide comprises at least 10 amino acid residues, more preferably at least 15 amino acid residues, even more preferably at least 20 amino acid residues, and most preferably at least 30 amino acid residues.

[0469] Preferred epitopes encompassed by the antigenic peptide are regions of TWIK-7 that are located on the surface of the protein, e.g. hydrophilic regions, as well as regions with high antigenicity (see, for example, FIG. 10).

[0470] A TWIK-7 immunogen typically is used to prepare antibodies by immunizing a suitable subject, (e.g., rabbit, goat, mouse or other mammal) with the immunogen. An appropriate immunogenic preparation can contain, for example, recombinantly expressed TWIK-7 protein or a chemically synthesized TWIK-7 polypeptide. The preparation can further include an adjuvant, such as Freund's complete or incomplete adjuvant, or similar immunostimulatory agent. Immunization of a suitable subject with an immunogenic TWIK-7 preparation induces a polyclonal anti-TWIK-7 antibody response.

[0471] Accordingly, another aspect of the invention pertains to anti-TWIK-7 antibodies. The term “antibody” as used herein refers to immunoglobulin molecules and immunologically active portions of immunoglobulin molecules, i.e., molecules that contain an antigen binding site which specifically binds (immunoreacts with) an antigen, such as TWIK-7. Examples of immunologically active portions of immunoglobulin molecules include F(ab) and F(ab′)₂ fragments which can be generated by treating the antibody with an enzyme such as pepsin. The invention provides polyclonal and monoclonal antibodies that bind TWIK-7. The term “monoclonal antibody” or “monoclonal antibody composition”, as used herein, refers to a population of antibody molecules that contain only one species of an antigen binding site capable of immunoreacting with a particular epitope of TWIK-7. A monoclonal antibody composition thus typically displays a single binding affinity for a particular TWIK-7 protein with which it immunoreacts.

[0472] Polyclonal anti-TWIK-7 antibodies can be prepared as described above by immunizing a suitable subject with a TWIK-7 immunogen. The anti-TWIK-7 antibody titer in the immunized subject can be monitored over time by standard techniques, such as with an enzyme linked immunosorbent assay (ELISA) using immobilized TWIK-7. If desired, the antibody molecules directed against TWIK-7 can be isolated from the mammal (e.g., from the blood) and further purified by well known techniques, such as protein A chromatography to obtain the IgG fraction. At an appropriate time after immunization, e.g., when the anti-TWIK-7 antibody titers are highest, antibody-producing cells can be obtained from the subject and used to prepare monoclonal antibodies by standard techniques, such as the hybridoma technique originally described by Kohler and Milstein (1975) Nature 256:495-497) (see also, Brown et al. (1981) J. Immunol. 127:539-46; Brown et al. (1980) J. Biol. Chem. 255:4980-83; Yeh et al. (1976) Proc. Natl. Acad. Sci. USA 76:2927-31; and Yeh et al. (1982) Int. J. Cancer 29:269-75), the more recent human B cell hybridoma technique (Kozbor et al. (1983) Immunol Today 4:72), the EBV-hybridoma technique (Cole et al. (1985), Monoclonal Antibodies and Cancer Therapy, Alan R. Liss, Inc., pp. 77-96) or trioma techniques. The technology for producing monoclonal antibody hybridomas is well known (see generally R. H. Kenneth, in Monoclonal Antibodies: A New Dimension In Biological Analyses, Plenum Publishing Corp., New York, N.Y. (1980); E. A. Lerner (1981) Yale J. Biol Med., 54:387-402; M. L. Gefter et al. (1977) Somatic Cell Genet. 3:231-36). Briefly, an immortal cell line (typically a myeloma) is fused to lymphocytes (typically splenocytes) from a mammal immunized with a TWIK-7 immunogen as described above, and the culture supernatants of the resulting hybridoma cells are screened to identify a hybridoma producing a monoclonal antibody that binds TWIK-7.

[0473] Any of the many well known protocols used for fusing lymphocytes and immortalized cell lines can be applied for the purpose of generating an anti-TWIK-7 monoclonal antibody (see, e.g., G. Galfre et al. (1977) Nature 266:55052; Gefter et al. Somatic Cell Genet., cited supra; Lerner, Yale J. Biol. Med., cited supra; Kenneth, Monoclonal Antibodies, cited supra). Moreover, the ordinarily skilled worker will appreciate that there are many variations of such methods which also would be useful. Typically, the immortal cell line (e.g., a myeloma cell line) is derived from the same mammalian species as the lymphocytes. For example, murine hybridomas can be made by fusing lymphocytes from a mouse immunized with an immunogenic preparation of the present invention with an immortalized mouse cell line. Preferred immortal cell lines are mouse myeloma cell lines that are sensitive to culture medium containing hypoxanthine, aminopterin and thymidine (“HAT medium”). Any of a number of myeloma cell lines can be used as a fusion partner according to standard techniques, e.g., the P3-NS1/1-Ag4-1, P3-x63-Ag8.653 or Sp2/O-Ag14 myeloma lines. These myeloma lines are available from ATCC™ (the American Type Culture Collection, Manassas, Va.). Typically, HAT-sensitive mouse myeloma cells are fused to mouse splenocytes using polyethylene glycol (“PEG”). Hybridoma cells resulting from the fusion are then selected using HAT medium, which kills unfused and unproductively fused myeloma cells (unfused splenocytes die after several days because they are not transformed). Hybridoma cells producing a monoclonal antibody of the invention are detected by screening the hybridoma culture supernatants for antibodies that bind TWIK-7, e.g., using a standard ELISA assay.

[0474] Alternative to preparing monoclonal antibody-secreting hybridomas, a monoclonal anti-TWIK-7 antibody can be identified and isolated by screening a recombinant combinatorial immunoglobulin library (e.g., an antibody phage display library) with TWIK-7 to thereby isolate immunoglobulin library members that bind TWIK-7. Kits for generating and screening phage display libraries are commercially available (e.g., the Pharmacia Recombinant Phage Antibody System, Catalog No. 27-9400-01; and the Stratagene SurfZAP™ Phage Display Kit, Catalog No. 240612). Additionally, examples of methods and reagents particularly amenable for use in generating and screening antibody display library can be found in, for example, Ladner et al. U.S. Pat. No. 5,223,409; Kang et al. PCT International Publication No. WO 92/18619; Dower et al. PCT International Publication No. WO 91/17271; Winter et al. PCT International Publication WO 92/20791; Markland et al. PCT International Publication No. WO 92/15679; Breitling et al. PCT International Publication WO 93/01288; McCafferty et al. PCT International Publication No. WO 92/01047; Garrard et a. PCT International Publication No. WO 92/09690; Ladner et al. PCT International Publication No. WO 90/02809; Fuchs et a. (1991) Bio/Technology 9:1369-1372; Hay et al. (1992) Hum. Antibod. Hybridomas 3:81-85; Huse et al. (1989) Science 246:1275-1281; Griffiths et al. (1993) EMBO J 12:725-734; Hawkins et al. (1992) J. Mol. Biol 226:889-896; Clackson et al. (1991) Nature 352:624-628; Gram et al. (1992) Proc. Natl. Acad. Sci USA 89:3576-3580; Garrard et al. (1991) Bio/Technology 9:1373-1377; Hoogenboom et al. (1991) Nuc. Acid Res. 19:4133-4137; Barbas et al. (1991) Proc. Natl. Acad. Sci. USA 88:7978-7982; and McCafferty et al. Nature (1990) 348:552-554.

[0475] Additionally, recombinant anti-TWIK-7 antibodies, such as chimeric and humanized monoclonal antibodies, comprising both human and non-human portions, which can be made using standard recombinant DNA techniques, are within the scope of the invention. Such chimeric and humanized monoclonal antibodies can be produced by recombinant DNA techniques known in the art, for example using methods described in Robinson et al. International Application No. PCT/US86/02269; Akira, et al. European Pat. Application 184,187; Taniguchi, M., European Patent Application 171,496; Morrison et al. European Patent Application 173,494; Neuberger et al. PCT International Publication No. WO 86/01533; Cabilly et al. U.S. Pat. No. 4,816,567, Cabilly et al. European Patent Application 125,023; Better et al. (1988) Science 240:1041-1043; Liu et al. (1987) Proc. Natl. Acad. Sci. USA 84:3439-3443; Liu et al. (1987) J. Immunol. 139:3521-3526; Sun et al. (1987) Proc. Natl. Acad. Sci. USA 84:214-218; Nishimura et al. (1987) Canc. Res. 47:999-1005; Wood et al. (1985) Nature 314:446-449; and Shaw et al. (1988) J. Natl. Cancer Inst. 80:1553-1559); Morrison, S. L. (1985) Science 229:1202-1207; Oi et al. (1986) BioTechniques 4:214; Winter U.S. Pat. No. 5,225,539; Jones et al. (1986) Nature 321:552-525; Verhoeyen et al. (1988) Science 239:1534; and Beidler et al. (1988) J. Immunol. 141:4053-4060.

[0476] An anti-TWIK-7 antibody (e.g., monoclonal antibody) can be used to isolate TWIK-7 by standard techniques, such as affinity chromatography or immunoprecipitation. An anti-TWIK-7 antibody can facilitate the purification of natural TWIK-7 from cells and of recombinantly produced TWIK-7 expressed in host cells. Moreover, an anti-TWIK-7 antibody can be used to detect TWIK-7 protein (e.g., in a cellular lysate or cell supernatant) in order to evaluate the abundance and pattern of expression of the TWIK-7 protein. Anti-TWIK-7 antibodies can be used diagnostically to monitor protein levels in tissue as part of a clinical testing procedure, e.g., to, for example, determine the efficacy of a given treatment regimen. Detection can be facilitated by coupling (i.e., physically linking) the antibody to a detectable substance. Examples of detectable substances include various enzymes, prosthetic groups, fluorescent materials, luminescent materials, bioluminescent materials, and radioactive materials. Examples of suitable enzymes include horseradish peroxidase, alkaline phosphatase, β-galactosidase, or acetylcholinesterase; examples of suitable prosthetic group complexes include streptavidin/biotin and avidin/biotin; examples of suitable fluorescent materials include umbelliferone, fluorescein, fluorescein isothiocyanate, rhodamine, dichlorotriazinylamine fluorescein, dansyl chloride or phycoerythrin; an example of a luminescent material includes luminol; examples of bioluminescent materials include luciferase, luciferin, and aequorin, and examples of suitable radioactive material include ¹²⁵I, ¹³¹I, ³⁵S or ³H.

[0477] III. Recombinant Expression Vectors and Host Cells

[0478] Another aspect of the invention pertains to vectors, preferably expression vectors, containing a nucleic acid encoding a TWIK-7 protein (or a portion thereof). As used herein, the term “vector” refers to a nucleic acid molecule capable of transporting another nucleic acid to which it has been linked. One type of vector is a “plasmid”, which refers to a circular double stranded DNA loop into which additional DNA segments can be ligated. Another type of vector is a viral vector, wherein additional DNA segments can be ligated into the viral genome. Certain vectors are capable of autonomous replication in a host cell into which they are introduced (e.g., bacterial vectors having a bacterial origin of replication and episomal mammalian vectors). Other vectors (e.g., non-episomal mammalian vectors) are integrated into the genome of a host cell upon introduction into the host cell, and thereby are replicated along with the host genome. Moreover, certain vectors are capable of directing the expression of genes to which they are operatively linked. Such vectors are referred to herein as “expression vectors”. In general, expression vectors of utility in recombinant DNA techniques are often in the form of plasmids. In the present specification, “plasmid” and “vector” can be used interchangeably as the plasmid is the most commonly used form of vector. However, the invention is intended to include such other forms of expression vectors, such as viral vectors (e.g., replication defective retroviruses, adenoviruses and adeno-associated viruses), which serve equivalent functions.

[0479] The recombinant expression vectors of the invention comprise a nucleic acid of the invention in a form suitable for expression of the nucleic acid in a host cell, which means that the recombinant expression vectors include one or more regulatory sequences, selected on the basis of the host cells to be used for expression, which is operatively linked to the nucleic acid sequence to be expressed. Within a recombinant expression vector, “operably linked” is intended to mean that the nucleotide sequence of interest is linked to the regulatory sequence(s) in a manner which allows for expression of the nucleotide sequence (e.g., in an in vitro transcription/translation system or in a host cell when the vector is introduced into the host cell). The term “regulatory sequence” is intended to include promoters, enhancers and other expression control elements (e.g., polyadenylation signals). Such regulatory sequences are described, for example, in Goeddel; Gene Expression Technology: Methods in Enzymology 185, Academic Press, San Diego, Calif. (1990). Regulatory sequences include those which direct constitutive expression of a nucleotide sequence in many types of host cells and those which direct expression of the nucleotide sequence only in certain host cells (e.g., tissue-specific regulatory sequences). It will be appreciated by those skilled in the art that the design of the expression vector can depend on such factors as the choice of the host cell to be transformed, the level of expression of protein desired, and the like. The expression vectors of the invention can be introduced into host cells to thereby produce proteins or peptides, including fusion proteins or peptides, encoded by nucleic acids as described herein (e.g., TWIK-7 proteins, mutant forms of TWIK-7 proteins, fusion proteins, and the like).

[0480] The recombinant expression vectors of the invention can be designed for expression of TWIK-7 proteins in prokaryotic or eukaryotic cells. For example, TWIK-7 proteins can be expressed in bacterial cells such as E. coli, insect cells (using baculovirus expression vectors) yeast cells or mammalian cells. Suitable host cells are discussed further in Goeddel, Gene Expression Technology: Methods in Enzymology 185, Academic Press, San Diego, Calif. (1990). Alternatively, the recombinant expression vector can be transcribed and translated in vitro, for example using T7 promoter regulatory sequences and T7 polymerase.

[0481] Expression of proteins in prokaryotes is most often carried out in E. coli with vectors containing constitutive or inducible promoters directing the expression of either fusion or non-fusion proteins. Fusion vectors add a number of amino acids to a protein encoded therein, usually to the amino terminus of the recombinant protein. Such fusion vectors typically serve three purposes: 1) to increase expression of recombinant protein; 2) to increase the solubility of the recombinant protein; and 3) to aid in the purification of the recombinant protein by acting as a ligand in affinity purification. Often, in fusion expression vectors, a proteolytic cleavage site is introduced at the junction of the fusion moiety and the recombinant protein to enable separation of the recombinant protein from the fusion moiety subsequent to purification of the fusion protein. Such enzymes, and their cognate recognition sequences, include Factor Xa, thrombin and enterokinase. Typical fusion expression vectors include pGEX (Pharmacia Biotech Inc; Smith, D. B. and Johnson, K. S. (1988) Gene 67:31-40), pMAL (New England Biolabs, Beverly, Mass.) and pRIT5 (Pharmacia, Piscataway, N.J.) which fuse glutathione S-transferase (GST), maltose E binding protein, or protein A, respectively, to the target recombinant protein.

[0482] Purified fusion proteins can be utilized in TWIK-7 activity assays, (e.g., direct assays or competitive assays described in detail below), or to generate antibodies specific for TWIK-7 proteins, for example. In a preferred embodiment, a TWIK-7 fusion protein expressed in a retroviral expression vector of the present invention can be utilized to infect bone marrow cells which are subsequently transplanted into irradiated recipients. The pathology of the subject recipient is then examined after sufficient time has passed (e.g., six (6) weeks).

[0483] Examples of suitable inducible non-fusion E. coli expression vectors include pTrc (Amann et al., (1988) Gene 69:301-315) and pET 11d (Studier et al., Gene Expression Technology. Methods in Enzymology 185, Academic Press, San Diego, Calif. (1990) 60-89). Target gene expression from the pTrc vector relies on host RNA polymerase transcription from a hybrid trp-lac fusion promoter. Target gene expression from the pET 11d vector relies on transcription from a T7 gn10-lac fusion promoter mediated by a coexpressed viral RNA polymerase (T7 gn1). This viral polymerase is supplied by host strains BL21(DE3) or HMS174(DE3) from a resident prophage harboring a T7 gn1 gene under the transcriptional control of the lacUV 5 promoter.

[0484] One strategy to maximize recombinant protein expression in E. coli is to express the protein in a host bacteria with an impaired capacity to proteolytically cleave the recombinant protein (Gottesman, S., Gene Expression Technology: Methods in Enzymology 185, Academic Press, San Diego, Calif. (1990) 119-128). Another strategy is to alter the nucleic acid sequence of the nucleic acid to be inserted into an expression vector so that the individual codons for each amino acid are those preferentially utilized in E. coli (Wada et al., (1992) Nucleic Acids Res. 20:2111-2118). Such alteration of nucleic acid sequences of the invention can be carried out by standard DNA synthesis techniques.

[0485] In another embodiment, the TWIK-7 expression vector is a yeast expression vector. Examples of vectors for expression in yeast S. cerevisiae include pYepSec1 (Baldari, et al., (1987) EMBO J. 6:229-234), pMFa (Kurjan and Herskowitz, (1982) Cell 30:933-943), pJRY88 (Schultz et al., (1987) Gene 54:113-123), pYES2 (Invitrogen Corporation, San Diego, Calif.), and picZ (Invitrogen Corp, San Diego, Calif.).

[0486] Alternatively, TWIK-7 proteins can be expressed in insect cells using baculovirus expression vectors. Baculovirus vectors available for expression of proteins in cultured insect cells (e.g., Sf9 cells) include the pAc series (Smith et al. (1983) Mol. Cell Biol. 3:2156-2165) and the pVL series (Lucklow and Summers (1989) Virology 170:31-39).

[0487] In yet another embodiment, a nucleic acid of the invention is expressed in mammalian cells using a mammalian expression vector. Examples of mammalian expression vectors include pCDM8 (Seed, B. (1987) Nature 329:840) and pMT2PC (Kaufman et al. (1987) EMBO J. 6:187-195). When used in mammalian cells, the expression vector's control functions are often provided by viral regulatory elements. For example, commonly used promoters are derived from polyoma, Adenovirus 2, cytomegalovirus and Simian Virus 40. For other suitable expression systems for both prokaryotic and eukaryotic cells see chapters 16 and 17 of Sambrook, J., Fritsh, E. F., and Maniatis, T. Molecular Cloning: A Laboratory Manual. 2nd, ed., Cold Spring Harbor Laboratory, Cold Spring Harbor Laboratory Press, Cold Spring Harbor, N.Y., 1989.

[0488] In another embodiment, the recombinant mammalian expression vector is capable of directing expression of the nucleic acid preferentially in a particular cell type (e.g., tissue-specific regulatory elements are used to express the nucleic acid). Tissue-specific regulatory elements are known in the art. Non-limiting examples of suitable tissue-specific promoters include the albumin promoter (liver-specific; Pinkert et al. (1987) Genes Dev. 1:268-277), lymphoid-specific promoters (Calame and Eaton (1988) Adv. Immunol. 43:235-275), in particular promoters of T cell receptors (Winoto and Baltimore (1989) EMBO J. 8:729-733) and immunoglobulins (Banerji et al. (1983) Cell 33:729-740; Queen and Baltimore (1983) Cell 33:741-748), neuron-specific promoters (e.g., the neurofilament promoter; Byrne and Ruddle (1989) Proc. Natl. Acad. Sci. USA 86:5473-5477), pancreas-specific promoters (Edlund et al. (1985) Science 230:912-916), and mammary gland-specific promoters (e.g., milk whey promoter; U.S. Pat. No. 4,873,316 and European Application Publication No. 264,166). Developmentally-regulated promoters are also encompassed, for example the murine hox promoters (Kessel and Gruss (1990) Science 249:374-379) and the α-fetoprotein promoter (Campes and Tilghman (1989) Genes Dev. 3:537-546).

[0489] The invention further provides a recombinant expression vector comprising a DNA molecule of the invention cloned into the expression vector in an antisense orientation. That is, the DNA molecule is operatively linked to a regulatory sequence in a manner which allows for expression (by transcription of the DNA molecule) of an RNA molecule which is antisense to TWIK-7 mRNA. Regulatory sequences operatively linked to a nucleic acid cloned in the antisense orientation can be chosen which direct the continuous expression of the antisense RNA molecule in a variety of cell types, for instance viral promoters and/or enhancers, or regulatory sequences can be chosen which direct constitutive, tissue specific or cell type specific expression of antisense RNA. The antisense expression vector can be in the form of a recombinant plasmid, phagemid or attenuated virus in which antisense nucleic acids are produced under the control of a high efficiency regulatory region, the activity of which can be determined by the cell type into which the vector is introduced. For a discussion of the regulation of gene expression using antisense genes see Weintraub, H. et al., Antisense RNA as a molecular tool for genetic analysis, Reviews—Trends in Genetics, Vol. 1(1) 1986.

[0490] Another aspect of the invention pertains to host cells into which a TWIK-7 nucleic acid molecule of the invention is introduced, e.g., a TWIK-7 nucleic acid molecule within a recombinant expression vector or a TWIK-7 nucleic acid molecule containing sequences which allow it to homologously recombine into a specific site of the host cell's genome. The terms “host cell” and “recombinant host cell” are used interchangeably herein. It is understood that such terms refer not only to the particular subject cell but to the progeny or potential progeny of such a cell. Because certain modifications may occur in succeeding generations due to either mutation or environmental influences, such progeny may not, in fact, be identical to the parent cell, but are still included within the scope of the term as used herein.

[0491] A host cell can be any prokaryotic or eukaryotic cell. For example, a TWIK-7 protein can be expressed in bacterial cells such as E. coli, insect cells, yeast or mammalian cells (such as Chinese hamster ovary cells (CHO) or COS cells). Other suitable host cells are known to those skilled in the art.

[0492] Vector DNA can be introduced into prokaryotic or eukaryotic cells via conventional transformation or transfection techniques. As used herein, the terms “transformation” and “transfection” are intended to refer to a variety of art-recognized techniques for introducing foreign nucleic acid (e.g., DNA) into a host cell, including calcium phosphate or calcium chloride co-precipitation, DEAE-dextran-mediated transfection, lipofection, or electroporation. Suitable methods for transforming or transfecting host cells can be found in Sambrook, et al. (Molecular Cloning: A Laboratory Manual. 2nd, ed, Cold Spring Harbor Laboratory, Cold Spring Harbor Laboratory Press, Cold Spring Harbor, N.Y., 1989), and other laboratory manuals.

[0493] For stable transfection of mammalian cells, it is known that, depending upon the expression vector and transfection technique used, only a small fraction of cells may integrate the foreign DNA into their genome. In order to identify and select these integrants, a gene that encodes a selectable marker (e.g., resistance to antibiotics) is generally introduced into the host cells along with the gene of interest. Preferred selectable markers include those which confer resistance to drugs, such as G418, hygromycin and methotrexate. Nucleic acid encoding a selectable marker can be introduced into a host cell on the same vector as that encoding a TWIK-7 protein or can be introduced on a separate vector. Cells stably transfected with the introduced nucleic acid can be identified by drug selection (e.g., cells that have incorporated the selectable marker gene will survive, while the other cells die).

[0494] A host cell of the invention, such as a prokaryotic or eukaryotic host cell in culture, can be used to produce (i.e., express) a TWIK-7 protein. Accordingly, the invention further provides methods for producing a TWIK-7 protein using the host cells of the invention. In one embodiment, the method comprises culturing the host cell of the invention (into which a recombinant expression vector encoding a TWIK-7 protein has been introduced) in a suitable medium such that a TWIK-7 protein is produced. In another embodiment, the method further comprises isolating a TWIK-7 protein from the medium or the host cell.

[0495] The host cells of the invention can also be used to produce non-human transgenic animals. For example, in one embodiment, a host cell of the invention is a fertilized oocyte or an embryonic stem cell into which TWIK-7-coding sequences have been introduced. Such host cells can then be used to create non-human transgenic animals in which exogenous TWIK-7 sequences have been introduced into their genome or homologous recombinant animals in which endogenous TWIK-7 sequences have been altered. Such animals are useful for studying the function and/or activity of a TWIK-7 and for identifying and/or evaluating modulators of TWIK-7 activity. As used herein, a “transgenic animal” is a non-human animal, preferably a mammal, more preferably a rodent such as a rat or mouse, in which one or more of the cells of the animal includes a transgene. Other examples of transgenic animals include non-human primates, sheep, dogs, cows, goats, chickens, amphibians, and the like. A transgene is exogenous DNA which is integrated into the genome of a cell from which a transgenic animal develops and which remains in the genome of the mature animal, thereby directing the expression of an encoded gene product in one or more cell types or tissues of the transgenic animal. As used herein, a “homologous recombinant animal” is a non-human animal, preferably a mammal, more preferably a mouse, in which an endogenous TWIK-7 gene has been altered by homologous recombination between the endogenous gene and an exogenous DNA molecule introduced into a cell of the animal, e.g., an embryonic cell of the animal, prior to development of the animal.

[0496] A transgenic animal of the invention can be created by introducing a TWIK-7-encoding nucleic acid into the male pronuclei of a fertilized oocyte, e.g., by microinjection, retroviral infection, and allowing the oocyte to develop in a pseudopregnant female foster animal. The TWIK-7 cDNA sequence of SEQ ID NO:14 can be introduced as a transgene into the genome of a non-human animal. Alternatively, a nonhuman homologue of a human TWIK-7 gene, such as a mouse or rat TWIK-7 gene, can be used as a transgene. Alternatively, a TWIK-7 gene homologue, such as another TWIK-7 family member, can be isolated based on hybridization to the TWIK-7 cDNA sequences of SEQ ID NO:14 or 16 (described further in subsection I above) and used as a transgene. Intronic sequences and polyadenylation signals can also be included in the transgene to increase the efficiency of expression of the transgene. A tissue-specific regulatory sequence(s) can be operably linked to a TWIK-7 transgene to direct expression of a TWIK-7 protein to particular cells. Methods for generating transgenic animals via embryo manipulation and microinjection, particularly animals such as mice, have become conventional in the art and are described, for example, in U.S. Pat. Nos. 4,736,866 and 4,870,009, both by Leder et al., U.S. Pat. No. 4,873,191 by Wagner et al. and in Hogan, B., Manipulating the Mouse Embryo, (Cold Spring Harbor Laboratory Press, Cold Spring Harbor, N.Y., 1986). Similar methods are used for production of other transgenic animals. A transgenic founder animal can be identified based upon the presence of a TWIK-7 transgene in its genome and/or expression of TWIK-7 mRNA in tissues or cells of the animals. A transgenic founder animal can then be used to breed additional animals carrying the transgene. Moreover, transgenic animals carrying a transgene encoding a TWIK-7 protein can further be bred to other transgenic animals carrying other transgenes.

[0497] To create a homologous recombinant animal, a vector is prepared which contains at least a portion of a TWIK-7 gene into which a deletion, addition or substitution has been introduced to thereby alter, e.g., functionally disrupt, the TWIK-7 gene. The TWIK-7 gene can be a human gene (e.g., the cDNA of SEQ ID NO:16), but more preferably, is a non-human homologue of a human TWIK-7 gene (e.g., a cDNA isolated by stringent hybridization with the nucleotide sequence of SEQ ID NO:14). For example, a mouse TWIK-7 gene can be used to construct a homologous recombination nucleic acid molecule, e.g., a vector, suitable for altering an endogenous TWIK-7 gene in the mouse genome. In a preferred embodiment, the homologous recombination nucleic acid molecule is designed such that, upon homologous recombination, the endogenous TWIK-7 gene is functionally disrupted (i.e., no longer encodes a functional protein; also referred to as a “knock out” vector). Alternatively, the homologous recombination nucleic acid molecule can be designed such that, upon homologous recombination, the endogenous TWIK-7 gene is mutated or otherwise altered but still encodes functional protein (e.g., the upstream regulatory region can be altered to thereby alter the expression of the endogenous TWIK-7 protein). In the homologous recombination nucleic acid molecule, the altered portion of the TWIK-7 gene is flanked at its 5′ and 3′ ends by additional nucleic acid sequence of the TWIK-7 gene to allow for homologous recombination to occur between the exogenous TWIK-7 gene carried by the homologous recombination nucleic acid molecule and an endogenous TWIK-7 gene in a cell, e.g., an embryonic stem cell. The additional flanking TWIK-7 nucleic acid sequence is of sufficient length for successful homologous recombination with the endogenous gene. Typically, several kilobases of flanking DNA (both at the 5′ and 3′ ends) are included in the homologous recombination nucleic acid molecule (see, e.g., Thomas, K. R. and Capecchi, M. R. (1987) Cell 51:503 for a description of homologous recombination vectors). The homologous recombination nucleic acid molecule is introduced into a cell, e.g., an embryonic stem cell line (e.g., by electroporation) and cells in which the introduced TWIK-7 gene has homologously recombined with the endogenous TWIK-7 gene are selected (see e.g., Li, E. et al. (1992) Cell 69:915). The selected cells can then injected into a blastocyst of an animal (e.g., a mouse) to form aggregation chimeras (see e.g., Bradley, A. in Teratocarcinomas and Embryonic Stem Cells: A Practical Approach, E. J. Robertson, ed. (IRL, Oxford, 1987) pp. 113-152). A chimeric embryo can then be implanted into a suitable pseudopregnant female foster animal and the embryo brought to term. Progeny harboring the homologously recombined DNA in their germ cells can be used to breed animals in which all cells of the animal contain the homologously recombined DNA by germline transmission of the transgene. Methods for constructing homologous recombination nucleic acid molecules, e.g., vectors, or homologous recombinant animals are described further in Bradley, A. (1991) Current Opinion in Biotechnology 2:823-829 and in PCT International Publication Nos.: WO 90/11354 by Le Mouellec et al.; WO 91/01140 by Smithies et al.; WO 92/0968 by Zijlstra et al.; and WO 93/04169 by Berns et al.

[0498] In another embodiment, transgenic non-human animals can be produced which contain selected systems which allow for regulated expression of the transgene. One example of such a system is the cre/loxP recombinase system of bacteriophage P1. For a description of the cre/loxP recombinase system, see, e.g., Lakso et al. (1992) Proc. Natl. Acad. Sci. USA 89:6232-6236. Another example of a recombinase system is the FLP recombinase system of Saccharomyces cerevisiae (O'Gorman et al. (1991) Science 251:1351-1355. If a cre/loxP recombinase system is used to regulate expression of the transgene, animals containing transgenes encoding both the Cre recombinase and a selected protein are required. Such animals can be provided through the construction of “double” transgenic animals, e.g., by mating two transgenic animals, one containing a transgene encoding a selected protein and the other containing a transgene encoding a recombinase.

[0499] Clones of the non-human transgenic animals described herein can also be produced according to the methods described in Wilmut, I. et al. (1997) Nature 385:810-813 and PCT International Publication Nos. WO 97/07668 and WO 97/07669. In brief, a cell, e.g, a somatic cell, from the transgenic animal can be isolated and induced to exit the growth cycle and enter G_{O} phase. The quiescent cell can then be fused, e.g., through the use of electrical pulses, to an enucleated oocyte from an animal of the same species from which the quiescent cell is isolated. The reconstructed oocyte is then cultured such that it develops to morula or blastocyte and then transferred to pseudopregnant female foster animal. The offspring borne of this female foster animal will be a clone of the animal from which the cell, e.g., the somatic cell, is isolated.

[0500] IV. Pharmaceutical Compositions

[0501] The TWIK-7 nucleic acid molecules, fragments of TWIK-7 proteins, and anti-TWIK-7 antibodies (also referred to herein as “active compounds”) of the invention can be incorporated into pharmaceutical compositions suitable for administration. Such compositions typically comprise the nucleic acid molecule, protein, or antibody and a pharmaceutically acceptable carrier. As used herein the language “pharmaceutically acceptable carrier” is intended to include any and all solvents, dispersion media, coatings, antibacterial and antifungal agents, isotonic and absorption delaying agents, and the like, compatible with pharmaceutical administration. The use of such media and agents for pharmaceutically active substances is well known in the art. Except insofar as any conventional media or agent is incompatible with the active compound, use thereof in the compositions is contemplated. Supplementary active compounds can also be incorporated into the compositions.

[0502] A pharmaceutical composition of the invention is formulated to be compatible with its intended route of administration. Examples of routes of administration include parenteral, e.g., intravenous, intradermal, subcutaneous, oral (e.g., inhalation), transdermal (topical), transmucosal, and rectal administration. Solutions or suspensions used for parenteral, intradermal, or subcutaneous application can include the following components: a sterile diluent such as water for injection, saline solution, fixed oils, polyethylene glycols, glycerine, propylene glycol or other synthetic solvents; antibacterial agents such as benzyl alcohol or methyl parabens; antioxidants such as ascorbic acid or sodium bisulfite; chelating agents such as ethylenediaminetetraacetic acid; buffers such as acetates, citrates or phosphates and agents for the adjustment of tonicity such as sodium chloride or dextrose. pH can be adjusted with acids or bases, such as hydrochloric acid or sodium hydroxide. The parenteral preparation can be enclosed in ampoules, disposable syringes or multiple dose vials made of glass or plastic.

[0503] Pharmaceutical compositions suitable for injectable use include sterile aqueous solutions (where water soluble) or dispersions and sterile powders for the extemporaneous preparation of sterile injectable solutions or dispersion. For intravenous administration, suitable carriers include physiological saline, bacteriostatic water, Cremophor EL™ (BASF, Parsippany, N.J.) or phosphate buffered saline (PBS). In all cases, the composition must be sterile and should be fluid to the extent that easy syringeability exists. It must be stable under the conditions of manufacture and storage and must be preserved against the contaminating action of microorganisms such as bacteria and fungi. The carrier can be a solvent or dispersion medium containing, for example, water, ethanol, polyol (for example, glycerol, propylene glycol, and liquid polyetheylene glycol, and the like), and suitable mixtures thereof. The proper fluidity can be maintained, for example, by the use of a coating such as lecithin, by the maintenance of the required particle size in the case of dispersion and by the use of surfactants. Prevention of the action of microorganisms can be achieved by various antibacterial and antifungal agents, for example, parabens, chlorobutanol, phenol, ascorbic acid, thimerosal, and the like. In many cases, it will be preferable to include isotonic agents, for example, sugars, polyalcohols such as manitol, sorbitol, sodium chloride in the composition. Prolonged absorption of the injectable compositions can be brought about by including in the composition an agent which delays absorption, for example, aluminum monostearate and gelatin.

[0504] Sterile injectable solutions can be prepared by incorporating the active compound (e.g., a fragment of a TWIK-7 protein or an anti-TWIK-7 antibody) in the required amount in an appropriate solvent with one or a combination of ingredients enumerated above, as required, followed by filtered sterilization. Generally, dispersions are prepared by incorporating the active compound into a sterile vehicle which contains a basic dispersion medium and the required other ingredients from those enumerated above. In the case of sterile powders for the preparation of sterile injectable solutions, the preferred methods of preparation are vacuum drying and freeze-drying which yields a powder of the active ingredient plus any additional desired ingredient from a previously sterile-filtered solution thereof.

[0505] Oral compositions generally include an inert diluent or an edible carrier. They can be enclosed in gelatin capsules or compressed into tablets. For the purpose of oral therapeutic administration, the active compound can be incorporated with excipients and used in the form of tablets, troches, or capsules. oral compositions can also be prepared using a fluid carrier for use as a mouthwash, wherein the compound in the fluid carrier is applied orally and swished and expectorated or swallowed. Pharmaceutically compatible binding agents, and/or adjuvant materials can be included as part of the composition. The tablets, pills, capsules, troches and the like can contain any of the following ingredients, or compounds of a similar nature: a binder such as microcrystalline cellulose, gum tragacanth or gelatin; an excipient such as starch or lactose, a disintegrating agent such as alginic acid, Primogel, or corn starch; a lubricant such as magnesium stearate or Sterotes; a glidant such as colloidal silicon dioxide; a sweetening agent such as sucrose or saccharin; or a flavoring agent such as peppermint, methyl salicylate, or orange flavoring.

[0506] For administration by inhalation, the compounds are delivered in the form of an aerosol spray from pressured container or dispenser which contains a suitable propellant, e.g., a gas such as carbon dioxide, or a nebulizer.

[0507] Systemic administration can also be by transmucosal or transdermal means. For transmucosal or transdermal administration, penetrants appropriate to the barrier to be permeated are used in the formulation. Such penetrants are generally known in the art, and include, for example, for transmucosal administration, detergents, bile salts, and fusidic acid derivatives. Transmucosal administration can be accomplished through the use of nasal sprays or suppositories. For transdermal administration, the active compounds are formulated into ointments, salves, gels, or creams as generally known in the art.

[0508] The compounds can also be prepared in the form of suppositories (e.g., with conventional suppository bases such as cocoa butter and other glycerides) or retention enemas for rectal delivery.

[0509] In one embodiment, the active compounds are prepared with carriers that will protect the compound against rapid elimination from the body, such as a controlled release formulation, including implants and microencapsulated delivery systems. Biodegradable, biocompatible polymers can be used, such as ethylene vinyl acetate, polyanhydrides, polyglycolic acid, collagen, polyorthoesters, and polylactic acid. Methods for preparation of such formulations will be apparent to those skilled in the art. The materials can also be obtained commercially from Alza Corporation and Nova Pharmaceuticals, Inc. Liposomal suspensions (including liposomes targeted to infected cells with monoclonal antibodies to viral antigens) can also be used as pharmaceutically acceptable carriers. These can be prepared according to methods known to those skilled in the art, for example, as described in U.S. Pat. No. 4,522,811.

[0510] It is especially advantageous to formulate oral or parenteral compositions in dosage unit form for ease of administration and uniformity of dosage. Dosage unit form as used herein refers to physically discrete units suited as unitary dosages for the subject to be treated; each unit containing a predetermined quantity of active compound calculated to produce the desired therapeutic effect in association with the required pharmaceutical carrier. The specification for the dosage unit forms of the invention are dictated by and directly dependent on the unique characteristics of the active compound and the particular therapeutic effect to be achieved, and the limitations inherent in the art of compounding such an active compound for the treatment of individuals.

[0511] Toxicity and therapeutic efficacy of such compounds can be determined by standard pharmaceutical procedures in cell cultures or experimental animals, e.g., for determining the LD50 (the dose lethal to 50% of the population) and the ED50 (the dose therapeutically effective in 50% of the population). The dose ratio between toxic and therapeutic effects is the therapeutic index and it can be expressed as the ratio LD50/ED50. Compounds which exhibit large therapeutic indices are preferred. While compounds that exhibit toxic side effects may be used, care should be taken to design a delivery system that targets such compounds to the site of affected tissue in order to minimize potential damage to uninfected cells and, thereby, reduce side effects.

[0512] The data obtained from the cell culture assays and animal studies can be used in formulating a range of dosage for use in humans. The dosage of such compounds lies preferably within a range of circulating concentrations that include the ED50 with little or no toxicity. The dosage may vary within this range depending upon the dosage form employed and the route of administration utilized. For any compound used in the method of the invention, the therapeutically effective dose can be estimated initially from cell culture assays. A dose may be formulated in animal models to achieve a circulating plasma concentration range that includes the IC50 (i.e., the concentration of the test compound which achieves a half-maximal inhibition of symptoms) as determined in cell culture. Such information can be used to more accurately determine useful doses in humans. Levels in plasma may be measured, for example, by high performance liquid chromatography.

[0513] As defined herein, a therapeutically effective amount of protein or polypeptide (i.e., an effective dosage) ranges from about 0.001 to 30 mg/kg body weight, preferably about 0.01 to 25 mg/kg body weight, more preferably about 0.1 to 20 mg/kg body weight, and even more preferably about 1 to 10 mg/kg, 2 to 9 mg/kg, 3 to 8 mg/kg, 4 to 7 mg/kg, or 5 to 6 mg/kg body weight. The skilled artisan will appreciate that certain factors may influence the dosage required to effectively treat a subject, including but not limited to the severity of the disease or disorder, previous treatments, the general health and/or age of the subject, and other diseases present. Moreover, treatment of a subject with a therapeutically effective amount of a protein, polypeptide, or antibody can include a single treatment or, preferably, can include a series of treatments.

[0514] In a preferred example, a subject is treated with antibody, protein, or polypeptide in the range of between about 0.1 to 20 mg/kg body weight, one time per week for between about 1 to 10 weeks, preferably between 2 to 8 weeks, more preferably between about 3 to 7 weeks, and even more preferably for about 4, 5, or 6 weeks. It will also be appreciated that the effective dosage of antibody, protein, or polypeptide used for treatment may increase or decrease over the course of a particular treatment. Changes in dosage may result and become apparent from the results of diagnostic assays as described herein.

[0515] The present invention encompasses agents which modulate expression or activity. An agent may, for example, be a small molecule. For example, such small molecules include, but are not limited to, peptides, peptidomimetics, amino acids, amino acid analogs, polynucleotides, polynucleotide analogs, nucleotides, nucleotide analogs, organic or inorganic compounds (i.e., including heteroorganic and organometallic compounds) having a molecular weight less than about 10,000 grams per mole, organic or inorganic compounds having a molecular weight less than about 5,000 grams per mole, organic or inorganic compounds having a molecular weight less than about 1,000 grams per mole, organic or inorganic compounds having a molecular weight less than about 500 grams per mole, and salts, esters, and other pharmaceutically acceptable forms of such compounds. It is understood that appropriate doses of small molecule agents depends upon a number of factors within the ken of the ordinarily skilled physician, veterinarian, or researcher. The dose(s) of the small molecule will vary, for example, depending upon the identity, size, and condition of the subject or sample being treated, further depending upon the route by which the composition is to be administered, if applicable, and the effect which the practitioner desires the small molecule to have upon the nucleic acid or polypeptide of the invention.

[0516] Exemplary doses include milligram or microgram amounts of the small molecule per kilogram of subject or sample weight (e.g., about 1 microgram per kilogram to about 500 milligrams per kilogram, about 100 micrograms per kilogram to about 5 milligrams per kilogram, or about 1 microgram per kilogram to about 50 micrograms per kilogram. It is furthermore understood that appropriate doses of a small molecule depend upon the potency of the small molecule with respect to the expression or activity to be modulated. Such appropriate doses may be determined using the assays described herein. When one or more of these small molecules is to be administered to an animal (e.g., a human) in order to modulate expression or activity of a polypeptide or nucleic acid of the invention, a physician, veterinarian, or researcher may, for example, prescribe a relatively low dose at first, subsequently increasing the dose until an appropriate response is obtained. In addition, it is understood that the specific dose level for any particular animal subject will depend upon a variety of factors including the activity of the specific compound employed, the age, body weight, general health, gender, and diet of the subject, the time of administration, the route of administration, the rate of excretion, any drug combination, and the degree of expression or activity to be modulated.

[0517] Further, an antibody (or fragment thereof) may be conjugated to a therapeutic moiety such as a cytotoxin, a therapeutic agent or a radioactive metal ion. A cytotoxin or cytotoxic agent includes any agent that is detrimental to cells. Examples include taxol, cytochalasin B, gramicidin D, ethidium bromide, emetine, mitomycin, etoposide, tenoposide, vincristine, vinblastine, colchicin, doxorubicin, daunorubicin, dihydroxy anthracin dione, mitoxantrone, mithramycin, actinomycin D, 1-dehydrotestosterone, glucocorticoids, procaine, tetracaine, lidocaine, propranolol, and puromycin and analogs or homologs thereof. Therapeutic agents include, but are not limited to, antimetabolites (e.g., methotrexate, 6-mercaptopurine, 6-thioguanine, cytarabine, 5-fluorouracil decarbazine), alkylating agents (e.g., mechlorethamine, thioepa chlorambucil, melphalan, carmustine (BSNU) and lomustine (CCNU), cyclothosphamide, busulfan, dibromomannitol, streptozotocin, mitomycin C, and cis-dichlorodiamine platinum (II) (DDP) cisplatin), anthracyclines (e.g., daunorubicin (formerly daunomycin) and doxorubicin), antibiotics (e.g., dactinomycin (formerly actinomycin), bleomycin, mithramycin, and anthramycin (AMC)), and anti-mitotic agents (e.g., vincristine and vinblastine).

[0518] The conjugates of the invention can be used for modifying a given biological response, the drug moiety is not to be construed as limited to classical chemical therapeutic agents. For example, the drug moiety may be a protein or polypeptide possessing a desired biological activity. Such proteins may include, for example, a toxin such as abrin, ricin A, pseudomonas exotoxin, or diphtheria toxin; a protein such as tumor necrosis factor, alpha-interferon, beta-interferon, nerve growth factor, platelet derived growth factor, tissue plasminogen activator; or, biological response modifiers such as, for example, lymphokines, interleukin-1 (“IL-1”), interleukin-2 (“IL-2”), interleukin-6 (“IL-6”), granulocyte macrophage colony stimulating factor (“GM-CSF”), granulocyte colony stimulating factor (“G-CSF”), or other growth factors.

[0519] Techniques for conjugating such therapeutic moiety to antibodies are well known, see, e.g., Arnon et al., “Monoclonal Antibodies For Immunotargeting Of Drugs In Cancer Therapy”, in Monoclonal Antibodies And Cancer Therapy, Reisfeld et al. (eds.), pp. 243-56 (Alan R. Liss, Inc. 1985); Hellstrom et al., “Antibodies For Drug Delivery”, in Controlled Drug Delivery (2nd Ed.), Robinson et al. (eds.), pp. 623-53 (Marcel Dekker, Inc. 1987); Thorpe, “Antibody Carriers Of Cytotoxic Agents In Cancer Therapy: A Review”, in Monoclonal Antibodies '84: Biological And Clinical Applications, Pinchera et al. (eds.), pp. 475-506 (1985); “Analysis, Results, And Future Prospective Of The Therapeutic Use Of Radiolabeled Antibody In Cancer Therapy”, in Monoclonal Antibodies For Cancer Detection And Therapy, Baldwin et al. (eds.), pp. 303-16 (Academic Press 1985), and Thorpe et al., “The Preparation And Cytotoxic Properties Of Antibody-Toxin Conjugates”, Immunol. Rev., 62:119-58 (1982). Alternatively, an antibody can be conjugated to a second antibody to form an antibody heteroconjugate as described by Segal in U.S. Pat. No. 4,676,980.

[0520] The nucleic acid molecules of the invention can be inserted into vectors and used as gene therapy vectors. Gene therapy vectors can be delivered to a subject by, for example, intravenous injection, local administration (see U.S. Pat. No. 5,328,470) or by stereotactic injection (see e.g., Chen et al. (1994) Proc. Natl. Acad. Sci. USA 91:3054-3057). The pharmaceutical preparation of the gene therapy vector can include the gene therapy vector in an acceptable diluent, or can comprise a slow release matrix in which the gene delivery vehicle is imbedded. Alternatively, where the complete gene delivery vector can be produced intact from recombinant cells, e.g., retroviral vectors, the pharmaceutical preparation can include one or more cells which produce the gene delivery system.

[0521] The pharmaceutical compositions can be included in a container, pack, or dispenser together with instructions for administration.

[0522] V. Uses and Methods of the Invention

[0523] The nucleic acid molecules, proteins, protein homologues, and antibodies described herein can be used in one or more of the following methods: a) screening assays; b) predictive medicine (e.g., diagnostic assays, prognostic assays, monitoring clinical trials, and pharmacogenetics); and c) methods of treatment (e.g., therapeutic and prophylactic). As described herein, a TWIK-7 protein of the invention has one or more of the following activities: (1) interacting with a non-TWIK protein molecule; (2) activating a TWIK-dependent signal transduction pathway; (3) modulating the release of neurotransmitters; (4) modulating membrane excitability; (5) influencing the resting potential of membranes, wave forms and frequencies of action potentials, and thresholds of excitation, (6) modulating processes which underlie learning and memory, such as integration of sub-threshold synaptic responses and the conductance of back-propagating action potentials, and (7) mediating nociception.

[0524] The isolated nucleic acid molecules of the invention can be used, for example, to express TWIK-7 protein (e.g., via a recombinant expression vector in a host cell in gene therapy applications), to detect TWIK-7 mRNA (e.g., in a biological sample) or a genetic alteration in a TWIK-7 gene, and to modulate TWIK-7 activity, as described further below. The TWIK-7 proteins can be used to treat disorders characterized by insufficient or excessive production of a TWIK-7 substrate or production of TWIK-7 inhibitors. In addition, the TWIK-7 proteins can be used to screen for naturally occurring TWIK-7 substrates, to screen for drugs or compounds which modulate TWIK-7 activity, as well as to treat disorders characterized by insufficient or excessive production of TWIK-7 protein or production of TWIK-7 protein forms which have decreased, aberrant or unwanted activity compared to TWIK-7 wild type protein (e.g., CNS disorders such as cognitive and neurodegenerative disorders (e.g., Alzheimer's disease, dementias related to Alzheimer's disease (such as Pick's disease), Parkinson's and other Lewy diffuse body diseases, senile dementia, Huntington's disease, Gilles de la Tourette's syndrome, multiple sclerosis, amyotrophic lateral sclerosis, progressive supranuclear palsy, epilepsy, and Jakob-Creutzfieldt disease; autonomic function disorders such as hypertension and sleep disorders, and neuropsychiatric disorders, such as depression, schizophrenia, schizoaffective disorder, korsakoff's psychosis, mania, anxiety disorders, or phobic disorders; learning or memory disorders, e.g., amnesia or age-related memory loss, attention deficit disorder, dysthymic disorder, major depressive disorder, mania, obsessive-compulsive disorder, psychoactive substance use disorders, anxiety, phobias, panic disorder, and bipolar affective disorder (e.g., severe bipolar affective (mood) disorder (BP-1) and bipolar affective neurological disorders (e.g., migraine and obesity)); cardiac disorders (e.g., arteriosclerosis, ischemia reperfusion injury, restenosis, arterial inflammation, vascular wall remodeling, ventricular remodeling, rapid ventricular pacing, coronary microembolism, tachycardia, bradycardia, pressure overload, aortic bending, coronary artery ligation, vascular heart disease, atrial fibrilation, Jervell syndrome, Lange-Nielsen syndrome, long-QT syndrome, congestive heart failure, sinus node dysfunction, angina, heart failure, hypertension, atrial fibrillation, atrial flutter, dilated cardiomyopathy, idiopathic cardiomyopathy, myocardial infarction, coronary artery disease, coronary artery spasm, and arrhythmia), muscular disorders (e.g., paralysis, muscle weakness (e.g., ataxia, myotonia, and myokymia), muscular dystrophy (e.g., Duchenne muscular dystrophy or myotonic dystrophy), spinal muscular atrophy, congenital myopathies, central core disease, rod myopathy, central nuclear myopathy, Lambert-Eaton syndrome, denervation, and infantile spinal muscular atrophy (Werdnig-Hoffman disease), pain disorders (e.g., headache (e.g., tension headache or migraine), back pain, cancer pain, arthritis pain, or neurogenic pain), and disorders of cellular growth, differentiation, or migration (e.g., cancer, e.g., carcinoma, sarcoma, or leukemia; tumor angiogenesis and metastasis; skeletal dysplasia; neuronal deficiencies resulting from impaired neural induction and patterning; neurodegenerative disorders, e.g., Alzheimer's disease, dementias related to Alzheimer's disease (such as Pick's disease), Parkinson's and other Lewy diffuse body diseases, multiple sclerosis, amyotrophic lateral sclerosis, progressive supranuclear palsy, epilepsy, Jakob-Creutzfieldt disease, or AIDS related dementia; hepatic disorders; cardiovascular disorders; and hematopoietic and/or myeloproliferative disorders). Moreover, the anti-TWIK-7 antibodies of the invention can be used to detect and isolate TWIK-7 proteins, to regulate the bioavailability of TWIK-7 proteins, and to modulate TWIK-7 activity.

[0525] A. Screening Assays:

[0526] The invention provides a method (also referred to herein as a “screening assay”) for identifying modulators, i.e., candidate or test compounds or agents (e.g., peptides, peptidomimetics, small molecules or other drugs) which bind to TWIK-7 proteins, have a stimulatory or inhibitory effect on, for example, TWIK-7 expression or TWIK-7 activity, or have a stimulatory or inhibitory effect on, for example, the expression or activity of TWIK-7 substrate.

[0527] In one embodiment, the invention provides assays for screening candidate or test compounds which are substrates of a TWIK-7 protein or polypeptide or biologically active portion thereof. In another embodiment, the invention provides assays for screening candidate or test compounds which bind to or modulate the activity of a TWIK-7 protein or polypeptide or biologically active portion thereof. The test compounds of the present invention can be obtained using any of the numerous approaches in combinatorial library methods known in the art, including: biological libraries; spatially addressable parallel solid phase or solution phase libraries; synthetic library methods requiring deconvolution; the ‘one-bead one-compound’ library method; and synthetic library methods using affinity chromatography selection. The biological library approach is limited to peptide libraries, while the other four approaches are applicable to peptide, non-peptide oligomer or small molecule libraries of compounds (Lam, K. S. (1997) Anticancer Drug Des. 12:145).

[0528] Examples of methods for the synthesis of molecular libraries can be found in the art, for example in: DeWitt et al. (1993) Proc. Natl. Acad. Sci. U.S.A. 90:6909; Erb et al. (1994) Proc. Natl. Acad. Sci. USA 91:11422; Zuckermann et al. (1994). J. Med. Chem. 37:2678; Cho et al. (1993) Science 261:1303; Carrell et al. (1994) Angew. Chem. Int. Ed. Engl. 33:2059; Carell et al. (1994) Angew. Chem. Int. Ed. Engl. 33:2061; and in Gallop et al. (1994) J. Med. Chem. 37:1233.

[0529] Libraries of compounds may be presented in solution (e.g., Houghten (1992) Biotechniques 13:412-421), or on beads (Lam (1991) Nature 354:82-84), chips (Fodor (1993) Nature 364:555-556), bacteria (Ladner U.S. Pat. No. '5,223,409), spores (Ladner U.S. Pat. No. '409), plasmids (Cull et al. (1992) Proc. Natl. Acad. Sci. USA 89:1865-1869) or on phage (Scott and Smith (1990) Science 249:386-390); (Devlin (1990) Science 249:404-406); (Cwirla et al. (1990) Proc. Natl. Acad. Sci. 87:6378-6382); (Felici (1991) J. Mol. Biol. 222:301-310); (Ladner supra.).

[0530] In one embodiment, an assay is a cell-based assay in which a cell which expresses a TWIK-7 protein or biologically active portion thereof is contacted with a test compound and the ability of the test compound to modulate TWIK-7 activity is determined. Determining the ability of the test compound to modulate TWIK-7 activity can be accomplished by monitoring, for example, the release of a neurotransmitter from a cell which expresses TWIK-7. The cell, for example, can be of mammalian origin, e.g., a neuronal cell or a spleen cell.

[0531] The ability of the test compound to modulate TWIK-7 binding to a substrate or to bind to TWIK-7 can also be determined. Determining the ability of the test compound to modulate TWIK-7 binding to a substrate can be accomplished, for example, by coupling the TWIK-7 substrate with a radioisotope or enzymatic label such that binding of the TWIK-7 substrate to TWIK-7 can be determined by detecting the labeled TWIK-7 substrate in a complex. Alternatively, TWIK-7 could be coupled with a radioisotope or enzymatic label to monitor the ability of a test compound to modulate TWIK-7 binding to a TWIK-7 substrate in a complex. Determining the ability of the test compound to bind TWIK-7 can be accomplished, for example, by coupling the compound with a radioisotope or enzymatic label such that binding of the compound to TWIK-7 can be determined by detecting the labeled TWIK-7 compound in a complex. For example, compounds (e.g., TWIK-7 substrates) can be labeled with ¹²⁵I, ³⁵S, ¹⁴C, or ³H, either directly or indirectly, and the radioisotope detected by direct counting of radioemission or by scintillation counting. Alternatively, compounds can be enzymatically labeled with, for example, horseradish peroxidase, alkaline phosphatase, or luciferase, and the enzymatic label detected by determination of conversion of an appropriate substrate to product.

[0532] It is also within the scope of this invention to determine the ability of a compound (e.g., a TWIK-7 substrate) to interact with TWIK-7 without the labeling of any of the interactants. For example, a microphysiometer can be used to detect the interaction of a compound with TWIK-7 without the labeling of either the compound or the TWIK-7. McConnell, H. M. et al. (1992) Science 257:1906-1912. As used herein, a “microphysiometer” (e.g., Cytosensor™) is an analytical instrument that measures the rate at which a cell acidifies its environment using a light-addressable potentiometric sensor (LAPS). Changes in this acidification rate can be used as an indicator of the interaction between a compound and TWIK-7.

[0533] In another embodiment, an assay is a cell-based assay comprising contacting a cell expressing a TWIK-7 target molecule (e.g., a TWIK-7 substrate) with a test compound and determining the ability of the test compound to modulate (e.g., stimulate or inhibit) the activity of the TWIK-7 target molecule. Determining the ability of the test compound to modulate the activity of a TWIK-7 target molecule can be accomplished, for example, by determining the ability of the TWIK-7 protein to bind to or interact with the TWIK-7 target molecule.

[0534] Determining the ability of the TWIK-7 protein, or a biologically active fragment thereof, to bind to or interact with a TWIK-7 target molecule can be accomplished by one of the methods described above for determining direct binding. In a preferred embodiment, determining the ability of the TWIK-7 protein to bind to or interact with a TWIK-7 target molecule can be accomplished by determining the activity of the target molecule. For example, the activity of the target molecule can be determined by detecting induction of a cellular response (i.e., changes in intracellular K⁺ levels), detecting catalytic/enzymatic activity of the target on an appropriate substrate, detecting the induction of a reporter gene (comprising a target-responsive regulatory element operatively linked to a nucleic acid encoding a detectable marker, e.g., luciferase), or detecting a target-regulated cellular response.

[0535] In yet another embodiment, an assay of the present invention is a cell-free assay in which a TWIK-7 protein or biologically active portion thereof is contacted with a test compound and the ability of the test compound to bind to the TWIK-7 protein or biologically active portion thereof is determined. Preferred biologically active portions of the TWIK-7 proteins to be used in assays of the present invention include fragments which participate in interactions with non-TWIK-7 molecules, e.g., fragments with high surface probability scores (see, for example, FIG. 10). Binding of the test compound to the TWIK-7 protein can be determined either directly or indirectly as described above. In a preferred embodiment, the assay includes contacting the TWIK-7 protein or biologically active portion thereof with a known compound which binds TWIK-7 to form an assay mixture, contacting the assay mixture with a test compound, and determining the ability of the test compound to interact with a TWIK-7 protein, wherein determining the ability of the test compound to interact with a TWIK-7 protein comprises determining the ability of the test compound to preferentially bind to TWIK-7 or biologically active portion thereof as compared to the known compound.

[0536] In another embodiment, the assay is a cell-free assay in which a TWIK-7 protein or biologically active portion thereof is contacted with a test compound and the ability of the test compound to modulate (e.g., stimulate or inhibit) the activity of the TWIK-7 protein or biologically active portion thereof is determined. Determining the ability of the test compound to modulate the activity of a TWIK-7 protein can be accomplished, for example, by determining the ability of the TWIK-7 protein to bind to a TWIK-7 target molecule by one of the methods described above for determining direct binding. Determining the ability of the TWIK-7 protein to bind to a TWIK-7 target molecule can also be accomplished using a technology such as real-time Biomolecular Interaction Analysis (BIA). Sjolander, S. and Urbaniczky, C. (1991) Anal. Chem. 63:2338-2345 and Szabo et al. (1995) Curr. Opin. Struct. Biol. 5:699-705. As used herein, “BIA” is a technology for studying biospecific interactions in real time, without labeling any of the interactants (e.g., BIAcore™). Changes in the optical phenomenon of surface plasmon resonance (SPR) can be used as an indication of real-time reactions between biological molecules.

[0537] In an alternative embodiment, determining the ability of the test compound to modulate the activity of a TWIK-7 protein can be accomplished by determining the ability of the TWIK-7 protein to further modulate the activity of a downstream effector of a TWIK-7 target molecule. For example, the activity of the effector molecule on an appropriate target can be determined or the binding of the effector to an appropriate target can be determined as previously described.

[0538] In yet another embodiment, the cell-free assay involves contacting a TWIK-7 protein or biologically active portion thereof with a known compound which binds the TWIK-7 protein to form an assay mixture, contacting the assay mixture with a test compound, and determining the ability of the test compound to interact with the TWIK-7 protein, wherein determining the ability of the test compound to interact with the TWIK-7 protein comprises determining the ability of the TWIK-7protein to preferentially bind to or modulate the activity of a TWIK-7 target molecule.

[0539] In more than one embodiment of the above assay methods of the present invention, it may be desirable to immobilize either TWIK-7 or its target molecule to facilitate separation of complexed from uncomplexed forms of one or both of the proteins, as well as to accommodate automation of the assay. Binding of a test compound to a TWIK-7 protein, or interaction of a TWIK-7 protein with a target molecule in the presence and absence of a candidate compound, can be accomplished in any vessel suitable for containing the reactants. Examples of such vessels include microtitre plates, test tubes, and micro-centrifuge tubes. In one embodiment, a fusion protein can be provided which adds a domain that allows one or both of the proteins to be bound to a matrix. For example, glutathione-S-transferase/TWIK-7 fusion proteins or glutathione-S-transferase/target fusion proteins can be adsorbed onto glutathione sepharose beads (Sigma Chemical, St. Louis, Mo.) or glutathione derivatized microtitre plates, which are then combined with the test compound or the test compound and either the non-adsorbed target protein or TWIK-7 protein, and the mixture incubated under conditions conducive to complex formation (e.g., at physiological conditions for salt and pH). Following incubation, the beads or microtitre plate wells are washed to remove any unbound components, the matrix immobilized in the case of beads, complex determined either directly or indirectly, for example, as described above. Alternatively, the complexes can be dissociated from the matrix, and the level of TWIK-7 binding or activity determined using standard techniques.

[0540] Other techniques for immobilizing proteins on matrices can also be used in the screening assays of the invention. For example, either a TWIK-7 protein or a TWIK-7 target molecule can be immobilized utilizing conjugation of biotin and streptavidin. Biotinylated TWIK-7 protein or target molecules can be prepared from biotin-NHS (N-hydroxy-succinimide) using techniques known in the art (e.g., biotinylation kit, Pierce Chemicals, Rockford, Ill.), and immobilized in the wells of streptavidin-coated 96 well plates (Pierce Chemical). Alternatively, antibodies reactive with TWIK-7 protein or target molecules but which do not interfere with binding of the TWIK-7 protein to its target molecule can be derivatized to the wells of the plate, and unbound target or TWIK-7 protein trapped in the wells by antibody conjugation. Methods for detecting such complexes, in addition to those described above for the GST-immobilized complexes, include immunodetection of complexes using antibodies reactive with the TWIK-7 protein or target molecule, as well as enzyme-linked assays which rely on detecting an enzymatic activity associated with the TWIK-7 protein or target molecule.

[0541] In another embodiment, modulators of TWIK-7 expression are identified in a method wherein a cell is contacted with a candidate compound and the expression of TWIK-7 mRNA or protein in the cell is determined. The level of expression of TWIK-7 mRNA or protein in the presence of the candidate compound is compared to the level of expression of TWIK-7 mRNA or protein in the absence of the candidate compound. The candidate compound can then be identified as a modulator of TWIK-7 expression based on this comparison. For example, when expression of TWIK-7 mRNA or protein is greater (statistically significantly greater) in the presence of the candidate compound than in its absence, the candidate compound is identified as a stimulator of TWIK-7 mRNA or protein expression. Alternatively, when expression of TWIK-7 mRNA or protein is less (statistically significantly less) in the presence of the candidate compound than in its absence, the candidate compound is identified as an inhibitor of TWIK-7 mRNA or protein expression. The level of TWIK-7 mRNA or protein expression in the cells can be determined by methods described herein for detecting TWIK-7 mRNA or protein.

[0542] In yet another aspect of the invention, the TWIK-7 proteins can be used as “bait proteins” in a two-hybrid assay or three-hybrid assay (see, e.g., U.S. Pat. No. 5,283,317; Zervos et al. (1993) Cell 72:223-232; Madura et al. (1993) J. Biol. Chem. 268:12046-12054; Bartel et al. (1993) Biotechniques 14:920-924; Iwabuchi et al. (1993) Oncogene 8:1693-1696; and Brent WO94/10300), to identify other proteins, which bind to or interact with TWIK-7 (“TWIK-7-binding proteins” or “TWIK-7-bp”) and are involved in TWIK-7 activity. Such TWIK-7-binding proteins are also likely to be involved in the propagation of signals by the TWIK-7 proteins or TWIK-7 targets as, for example, downstream elements of a TWIK-7-mediated signaling pathway. Alternatively, such TWIK-7-binding proteins are likely to be TWIK-7 inhibitors.

[0543] The two-hybrid system is based on the modular nature of most transcription factors, which consist of separable DNA-binding and activation domains. Briefly, the assay utilizes two different DNA constructs. In one construct, the gene that codes for a TWIK-7 protein is fused to a gene encoding the DNA binding domain of a known transcription factor (e.g., GAL-4). In the other construct, a DNA sequence, from a library of DNA sequences, that encodes an unidentified protein (“prey” or “sample”) is fused to a gene that codes for the activation domain of the known transcription factor. If the “bait” and the “prey” proteins are able to interact, in vivo, forming a TWIK-7-dependent complex, the DNA-binding and activation domains of the transcription factor are brought into close proximity. This proximity allows transcription of a reporter gene (e.g., LacZ) which is operably linked to a transcriptional regulatory site responsive to the transcription factor. Expression of the reporter gene can be detected and cell colonies containing the functional transcription factor can be isolated and used to obtain the cloned gene which encodes the protein which interacts with the TWIK-7 protein.

[0544] In another aspect, the invention pertains to a combination of two or more of the assays described herein. For example, a modulating agent can be identified using a cell-based or a cell free assay, and the ability of the agent to modulate the activity of a TWIK-7 protein can be confirmed in vivo, e.g., in an animal such as an animal model for cellular transformation and/or tumorigenesis.

[0545] This invention further pertains to novel agents identified by the above-described screening assays. Accordingly, it is within the scope of this invention to further use an agent identified as described herein in an appropriate animal model. For example, an agent identified as described herein (e.g., a TWIK-7 modulating agent, an antisense TWIK-7 nucleic acid molecule, a TWIK-7-specific antibody, or a TWIK-7-binding partner) can be used in an animal model to determine the efficacy, toxicity, or side effects of treatment with such an agent. Alternatively, an agent identified as described herein can be used in an animal model to determine the mechanism of action of such an agent. Furthermore, this invention pertains to uses of novel agents identified by the above-described screening assays for treatments as described herein.

[0546] B. Detection Assays

[0547] Portions or fragments of the cDNA sequences identified herein (and the corresponding complete gene sequences) can be used in numerous ways as polynucleotide reagents. For example, these sequences can be used to: (i) map their respective genes on a chromosome; and, thus, locate gene regions associated with genetic disease; (ii) identify an individual from a minute biological sample (tissue typing); and (iii) aid in forensic identification of a biological sample. These applications are described in the subsections below.

[0548] 1. Chromosome Mapping

[0549] Once the sequence (or a portion of the sequence) of a gene has been isolated, this sequence can be used to map the location of the gene on a chromosome. This process is called chromosome mapping. Accordingly, portions or fragments of the TWIK-7 nucleotide sequences, described herein, can be used to map the location of the TWIK-7 genes on a chromosome. The mapping of the TWIK-7 sequences to chromosomes is an important first step in correlating these sequences with genes associated with disease.

[0550] Briefly, TWIK-7 genes can be mapped to chromosomes by preparing PCR primers (preferably 15-25 bp in length) from the TWIK-7 nucleotide sequences. Computer analysis of the TWIK-7 sequences can be used to predict primers that do not span more than one exon in the genomic DNA, thus complicating the amplification process. These primers can then be used for PCR screening of somatic cell hybrids containing individual human chromosomes. Only those hybrids containing the human gene corresponding to the TWIK-7 sequences will yield an amplified fragment.

[0551] Somatic cell hybrids are prepared by fusing somatic cells from different mammals (e.g., human and mouse cells). As hybrids of human and mouse cells grow and divide, they gradually lose human chromosomes in random order, but retain the mouse chromosomes. By using media in which mouse cells cannot grow, because they lack a particular enzyme, but human cells can, the one human chromosome that contains the gene encoding the needed enzyme, will be retained. By using various media, panels of hybrid cell lines can be established. Each cell line in a panel contains either a single human chromosome or a small number of human chromosomes, and a full set of mouse chromosomes, allowing easy mapping of individual genes to specific human chromosomes. (D'Eustachio P. et al. (1983) Science 220:919-924). Somatic cell hybrids containing only fragments of human chromosomes can also be produced by using human chromosomes with translocations and deletions.

[0552] PCR mapping of somatic cell hybrids is a rapid procedure for assigning a particular sequence to a particular chromosome. Three or more sequences can be assigned per day using a single thermal cycler. Using the TWIK-7 nucleotide sequences to design oligonucleotide primers, sublocalization can be achieved with panels of fragments from specific chromosomes. Other mapping strategies which can similarly be used to map a TWIK-7 sequence to its chromosome include in situ hybridization (described in Fan, Y. et al. (1990) Proc. Natl. Acad. Sci. USA, 87:6223-27), pre-screening with labeled flow-sorted chromosomes, and pre-selection by hybridization to chromosome specific cDNA libraries.

[0553] Fluorescence in situ hybridization (FISH) of a DNA sequence to a metaphase chromosomal spread can further be used to provide a precise chromosomal location in one step. Chromosome spreads can be made using cells whose division has been blocked in metaphase by a chemical such as colcemid that disrupts the mitotic spindle. The chromosomes can be treated briefly with trypsin, and then stained with Giemsa. A pattern of light and dark bands develops on each chromosome, so that the chromosomes can be identified individually. The FISH technique can be used with a DNA sequence as short as 500 or 600 bases. However, clones larger than 1,000 bases have a higher likelihood of binding to a unique chromosomal location with sufficient signal intensity for simple detection. Preferably 1,000 bases, and more preferably 2,000 bases will suffice to get good results at a reasonable amount of time. For a review of this technique, see Verma et al., Human Chromosomes: A Manual of Basic Techniques (Pergamon Press, New York 1988).

[0554] Reagents for chromosome mapping can be used individually to mark a single chromosome or a single site on that chromosome, or panels of reagents can be used for marking multiple sites and/or multiple chromosomes. Reagents corresponding to noncoding regions of the genes actually are preferred for mapping purposes. Coding sequences are more likely to be conserved within gene families, thus increasing the chance of cross hybridizations during chromosomal mapping.

[0555] Once a sequence has been mapped to a precise chromosomal location, the physical position of the sequence on the chromosome can be correlated with genetic map data. (Such data are found, for example, in V. McKusick, Mendelian Inheritance in Man, available on-line through Johns Hopkins University Welch Medical Library). The relationship between a gene and a disease, mapped to the same chromosomal region, can then be identified through linkage analysis (co-inheritance of physically adjacent genes), described in, for example, Egeland, J. et al. (1987) Nature, 325:783-787.

[0556] Moreover, differences in the DNA sequences between individuals affected and unaffected with a disease associated with the TWIK-7 gene can be determined. If a mutation is observed in some or all of the affected individuals but not in any unaffected individuals, then the mutation is likely to be the causative agent of the particular disease. Comparison of affected and unaffected individuals generally involves first looking for structural alterations in the chromosomes, such as deletions or translocations that are visible from chromosome spreads or detectable using PCR based on that DNA sequence. Ultimately, complete sequencing of genes from several individuals can be performed to confirm the presence of a mutation and to distinguish mutations from polymorphisms.

[0557] 2. Tissue Typing

[0558] The TWIK-7 sequences of the present invention can also be used to identify individuals from minute biological samples. The United States military, for example, is considering the use of restriction fragment length polymorphism (RFLP) for identification of its personnel. In this technique, an individual's genomic DNA is digested with one or more restriction enzymes, and probed on a Southern blot to yield unique bands for identification. This method does not suffer from the current limitations of “Dog Tags” which can be lost, switched, or stolen, making positive identification difficult. The sequences of the present invention are useful as additional DNA markers for RFLP (described in U.S. Pat. No. 5,272,057).

[0559] Furthermore, the sequences of the present invention can be used to provide an alternative technique which determines the actual base-by-base DNA sequence of selected portions of an individual's genome. Thus, the TWIK-7 nucleotide sequences described herein can be used to prepare two PCR primers from the 5′ and 3′ ends of the sequences. These primers can then be used to amplify an individual's DNA and subsequently sequence it.

[0560] Panels of corresponding DNA sequences from individuals, prepared in this manner, can provide unique individual identifications, as each individual will have a unique set of such DNA sequences due to allelic differences. The sequences of the present invention can be used to obtain such identification sequences from individuals and from tissue. The TWIK-7 nucleotide sequences of the invention uniquely represent portions of the human genome. Allelic variation occurs to some degree in the coding regions of these sequences, and to a greater degree in the noncoding regions. It is estimated that allelic variation between individual humans occurs with a frequency of about once per each 500 bases. Each of the sequences described herein can, to some degree, be used as a standard against which DNA from an individual can be compared for identification purposes. Because greater numbers of polymorphisms occur in the noncoding regions, fewer sequences are necessary to differentiate individuals. The noncoding sequences of SEQ ID NO:14 can comfortably provide positive individual identification with a panel of perhaps 10 to 1,000 primers which each yield a noncoding amplified sequence of 100 bases. If predicted coding sequences, such as those in SEQ ID NO:16 are used, a more appropriate number of primers for positive individual identification would be 500-2,000.

[0561] If a panel of reagents from TWIK-7 nucleotide sequences described herein is used to generate a unique identification database for an individual, those same reagents can later be used to identify tissue from that individual. Using the unique identification database, positive identification of the individual, living or dead, can be made from extremely small tissue samples.

[0562] 3. Use of TWIK-7 Sequences in Forensic Biology

[0563] DNA-based identification techniques can also be used in forensic biology. Forensic biology is a scientific field employing genetic typing of biological evidence found at a crime scene as a means for positively identifying, for example, a perpetrator of a crime. To make such an identification, PCR technology can be used to amplify DNA sequences taken from very small biological samples such as tissues, e.g., hair or skin, or body fluids, e.g., blood, saliva, or semen found at a crime scene. The amplified sequence can then be compared to a standard, thereby allowing identification of the origin of the biological sample.

[0564] The sequences of the present invention can be used to provide polynucleotide reagents, e.g., PCR primers, targeted to specific loci in the human genome, which can enhance the reliability of DNA-based forensic identifications by, for example, providing another “identification marker” (i.e. another DNA sequence that is unique to a particular individual). As mentioned above, actual base sequence information can be used for identification as an accurate alternative to patterns formed by restriction enzyme generated fragments. Sequences targeted to noncoding regions of SEQ ID NO:14 are particularly appropriate for this use as greater numbers of polymorphisms occur in the noncoding regions, making it easier to differentiate individuals using this technique. Examples of polynucleotide reagents include the TWIK-7 nucleotide sequences or portions thereof, e.g., fragments derived from the noncoding regions of SEQ ID NO:14 having a length of at least 20 bases, preferably at least 30 bases.

[0565] The TWIK-7 nucleotide sequences described herein can further be used to provide polynucleotide reagents, e.g., labeled or labelable probes which can be used in, for example, an in situ hybridization technique, to identify a specific tissue, e.g., brain tissue. This can be very useful in cases where a forensic pathologist is presented with a tissue of unknown origin. Panels of such TWIK-7 probes can be used to identify tissue by species and/or by organ type.

[0566] In a similar fashion, these reagents, e.g., TWIK-7 primers or probes can be used to screen tissue culture for contamination (i.e. screen for the presence of a mixture of different types of cells in a culture).

[0567] C. Predictive Medicine:

[0568] The present invention also pertains to the field of predictive medicine in which diagnostic assays, prognostic assays, and monitoring clinical trials are used for prognostic (predictive) purposes to thereby treat an individual prophylactically. Accordingly, one aspect of the present invention relates to diagnostic assays for determining TWIK-7 protein and/or nucleic acid expression as well as TWIK-7 activity, in the context of a biological sample (e.g., blood, serum, cells, tissue) to thereby determine whether an individual is afflicted with a disease or disorder, or is at risk of developing a disorder, associated with aberrant or unwanted TWIK-7 expression or activity. The invention also provides for prognostic (or predictive) assays for determining whether an individual is at risk of developing a disorder associated with TWIK-7 protein, nucleic acid expression or activity. For example, mutations in a TWIK-7 gene can be assayed in a biological sample. Such assays can be used for prognostic or predictive purpose to thereby prophylactically treat an individual prior to the onset of a disorder characterized by or associated with TWIK-7 protein, nucleic acid expression or activity.

[0569] Another aspect of the invention pertains to monitoring the influence of agents (e.g., drugs, compounds) on the expression or activity of TWIK-7 in clinical trials.

[0570] These and other agents are described in further detail in the following sections.

[0571] 1. Diagnostic Assays

[0572] An exemplary method for detecting the presence or absence of TWIK-7 protein or nucleic acid in a biological sample involves obtaining a biological sample from a test subject and contacting the biological sample with a compound or an agent capable of detecting TWIK-7 protein or nucleic acid (e.g., mRNA, or genomic DNA) that encodes TWIK-7 protein such that the presence of TWIK-7 protein or nucleic acid is detected in the biological sample. A preferred agent for detecting TWIK-7 mRNA or genomic DNA is a labeled nucleic acid probe capable of hybridizing to TWIK-7 mRNA or genomic DNA. The nucleic acid probe can be, for example, the TWIK-7 nucleic acid set forth in SEQ ID NO:14 or 16, or a portion thereof, such as an oligonucleotide of at least 15, 30, 50, 100, 250 or 500 nucleotides in length and sufficient to specifically hybridize under stringent conditions to TWIK-7 mRNA or genomic DNA. Other suitable probes for use in the diagnostic assays of the invention are described herein.

[0573] A preferred agent for detecting TWIK-7 protein is an antibody capable of binding to TWIK-7 protein, preferably an antibody with a detectable label. Antibodies can be polyclonal, or more preferably, monoclonal. An intact antibody, or a fragment thereof (e.g., Fab or F(ab′)₂) can be used. The term “labeled”, with regard to the probe or antibody, is intended to encompass direct labeling of the probe or antibody by coupling (i.e., physically linking) a detectable substance to the probe or antibody, as well as indirect labeling of the probe or antibody by reactivity with another reagent that is directly labeled. Examples of indirect labeling include detection of a primary antibody using a fluorescently labeled secondary antibody and end-labeling of a DNA probe with biotin such that it can be detected with fluorescently labeled streptavidin. The term “biological sample” is intended to include tissues, cells and biological fluids isolated from a subject, as well as tissues, cells and fluids present within a subject. That is, the detection method of the invention can be used to detect TWIK-7 mRNA, protein, or genomic DNA in a biological sample in vitro as well as in vivo. For example, in vitro techniques for detection of TWIK-7 mRNA include Northern hybridizations and in situ hybridizations. In vitro techniques for detection of TWIK-7 protein include enzyme linked immunosorbent assays (ELISAs), Western blots, immunoprecipitations and immunofluorescence. In vitro techniques for detection of TWIK-7 genomic DNA include Southern hybridizations. Furthermore, in vivo techniques for detection of TWIK-7 protein include introducing into a subject a labeled anti-TWIK-7 antibody. For example, the antibody can be labeled with a radioactive marker whose presence and location in a subject can be detected by standard imaging techniques.

[0574] In one embodiment, the biological sample contains protein molecules from the test subject. Alternatively, the biological sample can contain mRNA molecules from the test subject or genomic DNA molecules from the test subject. A preferred biological sample is a serum sample isolated by conventional means from a subject.

[0575] In another embodiment, the methods further involve obtaining a control biological sample from a control subject, contacting the control sample with a compound or agent capable of detecting TWIK-7 protein, mRNA, or genomic DNA, such that the presence of TWIK-7 protein, mRNA or genomic DNA is detected in the biological sample, and comparing the presence of TWIK-7 protein, mRNA or genomic DNA in the control sample with the presence of TWIK-7 protein, mRNA or genomic DNA in the test sample.

[0576] The invention also encompasses kits for detecting the presence of TWIK-7 in a biological sample. For example, the kit can comprise a labeled compound or agent capable of detecting TWIK-7 protein or mRNA in a biological sample; means for determining the amount of TWIK-7 in the sample; and means for comparing the amount of TWIK-7 in the sample with a standard. The compound or agent can be packaged in a suitable container. The kit can further comprise instructions for using the kit to detect TWIK-7 protein or nucleic acid.

[0577] 2. Prognostic Assays

[0578] The diagnostic methods described herein can furthermore be utilized to identify subjects having or at risk of developing a disease or disorder associated with aberrant or unwanted TWIK-7 expression or activity. As used herein, the term “aberrant” includes a TWIK-7 expression or activity which deviates from the wild type TWIK-7 expression or activity. Aberrant expression or activity includes increased or decreased expression or activity, as well as expression or activity which does not follow the wild type developmental pattern of expression or the subcellular pattern of expression. For example, aberrant TWIK-7 expression or activity is intended to include the cases in which a mutation in the TWIK-7 gene causes the TWIK-7 gene to be under-expressed or over-expressed and situations in which such mutations result in a non-functional TWIK-7 protein or a protein which does not function in a wild-type fashion, e.g., a protein which does not interact with a TWIK-7 substrate, e.g., a non-potassium channel subunit or ligand, or one which interacts with a non-TWIK-7 substrate, e.g. a non-potassium channel subunit or ligand. As used herein, the term “unwanted” includes an unwanted phenomenon involved in a biological response such as cellular proliferation. For example, the term unwanted includes a TWIK-7 expression or activity which is undesirable in a subject.

[0579] The assays described herein, such as the preceding diagnostic assays or the following assays, can be utilized to identify a subject having or at risk of developing a disorder associated with a misregulation in TWIK-7 protein activity or nucleic acid expression, such as a CNS disorder (e.g., a cognitive or neurodegenerative disorder, a pain disorder, a muscular disorder, or a cellular proliferation, growth, differentiation, or migration disorder), a cardiovascular disorder, or a pain disorder. Alternatively, the prognostic assays can be utilized to identify a subject having or at risk for developing a disorder associated with a misregulation in TWIK-7 protein activity or nucleic acid expression, such as a CNS disorder, a cardiovascular disorder, or a pain disorder, or a cellular proliferation, growth, differentiation, or migration disorder. Thus, the present invention provides a method for identifying a disease or disorder associated with aberrant or unwanted TWIK-7 expression or activity in which a test sample is obtained from a subject and TWIK-7 protein or nucleic acid (e.g., mRNA or genomic DNA) is detected, wherein the presence of TWIK-7 protein or nucleic acid is diagnostic for a subject having or at risk of developing a disease or disorder associated with aberrant or unwanted TWIK-7 expression or activity. As used herein, a “test sample” refers to a biological sample obtained from a subject of interest. For example, a test sample can be a biological fluid (e.g., cerebrospinal fluid or serum), cell sample, or tissue.

[0580] Furthermore, the prognostic assays described herein can be used to determine whether a subject can be administered an agent (e.g., an agonist, antagonist, peptidomimetic, protein, peptide, nucleic acid, small molecule, or other drug candidate) to treat a disease or disorder associated with aberrant or unwanted TWIK-7 expression or activity. For example, such methods can be used to determine whether a subject can be effectively treated with an agent for a CNS disorder, a muscular disorder, a pain disorder, or a cellular proliferation, growth, differentiation, or migration disorder. Thus, the present invention provides methods for determining whether a subject can be effectively treated with an agent for a disorder associated with aberrant or unwanted TWIK-7 expression or activity in which a test sample is obtained and TWIK-7 protein or nucleic acid expression or activity is detected (e.g., wherein the abundance of TWIK-7 protein or nucleic acid expression or activity is diagnostic for a subject that can be administered the agent to treat a disorder associated with aberrant or unwanted TWIK-7 expression or activity).

[0581] The methods of the invention can also be used to detect genetic alterations in a TWIK-7 gene, thereby determining if a subject with the altered gene is at risk for a disorder characterized by misregulation in TWIK-7 protein activity or nucleic acid expression, such as a CNS disorder, a cardiovascular disorder, a pain disorder, or a disorder of cellular growth, differentiation, or migration. In preferred embodiments, the methods include detecting, in a sample of cells from the subject, the presence or absence of a genetic alteration characterized by at least one of an alteration affecting the integrity of a gene encoding a TWIK-7-protein, or the mis-expression of the TWIK-7 gene. For example, such genetic alterations can be detected by ascertaining the existence of at least one of 1) a deletion of one or more nucleotides from a TWIK-7 gene; 2) an addition of one or more nucleotides to a TWIK-7 gene; 3) a substitution of one or more nucleotides of a TWIK-7 gene, 4) a chromosomal rearrangement of a TWIK-7 gene; 5) an alteration in the level of a messenger RNA transcript of a TWIK-7 gene, 6) aberrant modification of a TWIK-7 gene, such as of the methylation pattern of the genomic DNA, 7) the presence of a non-wild type splicing pattern of a messenger RNA transcript of a TWIK-7 gene, 8) a non-wild type level of a TWIK-7-protein, 9) allelic loss of a TWIK-7 gene, and 10) inappropriate post-translational modification of a TWIK-7-protein. As described herein, there are a large number of assays known in the art which can be used for detecting alterations in a TWIK-7 gene. A preferred biological sample is a tissue or serum sample isolated by conventional means from a subject.

[0582] In certain embodiments, detection of the alteration involves the use of a probe/primer in a polymerase chain reaction (PCR) (see, e.g., U.S. Pat. Nos. 4,683,195 and 4,683,202), such as anchor PCR or RACE PCR, or, alternatively, in a ligation chain reaction (LCR) (see, e.g., Landegran et al. (1988) Science 241:1077-1080; and Nakazawa et al. (1994) Proc. Natl. Acad. Sci. USA 91:360-364), the latter of which can be particularly useful for detecting point mutations in the TWIK-7-gene (see Abravaya et al. (1995) Nucleic Acids Res. 23:675-682). This method can include the steps of collecting a sample of cells from a subject, isolating nucleic acid (e.g., genomic, mRNA or both) from the cells of the sample, contacting the nucleic acid sample with one or more primers which specifically hybridize to a TWIK-7 gene under conditions such that hybridization and amplification of the TWIK-7-gene (if present) occurs, and detecting the presence or absence of an amplification product, or detecting the size of the amplification product and comparing the length to a control sample. It is anticipated that PCR and/or LCR may be desirable to use as a preliminary amplification step in conjunction with any of the techniques used for detecting mutations described herein.

[0583] Alternative amplification methods include: self sustained sequence replication (Guatelli, J. C. et al., (1990) Proc. Natl. Acad. Sci. USA 87:1874-1878), transcriptional amplification system (Kwoh, D. Y. et al., (1989) Proc. Natl. Acad. Sci. USA 86:1173-1177), Q-Beta Replicase (Lizardi, P. M. et al. (1988) Bio-Technology 6:1197), or any other nucleic acid amplification method, followed by the detection of the amplified molecules using techniques well known to those of skill in the art. These detection schemes are especially useful for the detection of nucleic acid molecules if such molecules are present in very low numbers.

[0584] In an alternative embodiment, mutations in a TWIK-7 gene from a sample cell can be identified by alterations in restriction enzyme cleavage patterns. For example, sample and control DNA is isolated, amplified (optionally), digested with one or more restriction endonucleases, and fragment length sizes are determined by gel electrophoresis and compared. Differences in fragment length sizes between sample and control DNA indicates mutations in the sample DNA. Moreover, the use of sequence specific ribozymes (see, for example, U.S. Pat. No. 5,498,531) can be used to score for the presence of specific mutations by development or loss of a ribozyme cleavage site.

[0585] In other embodiments, genetic mutations in TWIK-7 can be identified by hybridizing a sample and control nucleic acids, e.g., DNA or RNA, to high density arrays containing hundreds or thousands of oligonucleotides probes (Cronin, M. T. et al. (1996) Human Mutation 7: 244-255; Kozal, M. J. et al. (1996) Nature Medicine 2: 753-759). For example, genetic mutations in TWIK-7 can be identified in two dimensional arrays containing light-generated DNA probes as described in Cronin, M. T. et al. supra. Briefly, a first hybridization array of probes can be used to scan through long stretches of DNA in a sample and control to identify base changes between the sequences by making linear arrays of sequential overlapping probes. This step allows the identification of point mutations. This step is followed by a second hybridization array that allows the characterization of specific mutations by using smaller, specialized probe arrays complementary to all variants or mutations detected. Each mutation array is composed of parallel probe sets, one complementary to the wild-type gene and the other complementary to the mutant gene.

[0586] In yet another embodiment, any of a variety of sequencing reactions known in the art can be used to directly sequence the TWIK-7 gene and detect mutations by comparing the sequence of the sample TWIK-7 with the corresponding wild-type (control) sequence. Examples of sequencing reactions include those based on techniques developed by Maxam and Gilbert ((1977) Proc. Natl. Acad. Sci. USA 74:560) or Sanger ((1977) Proc. Natl. Acad. Sci. USA 74:5463). It is also contemplated that any of a variety of automated sequencing procedures can be utilized when performing the diagnostic assays ((1995) Biotechniques 19:448), including sequencing by mass spectrometry (see, e.g., PCT International Publication No. WO 94/16101; Cohen et al. (1996) Adv. Chromatogr. 36:127-162; and Griffin et al. (1993) Appl. Biochem. Biotechnol. 38:147-159).

[0587] Other methods for detecting mutations in the TWIK-7 gene include methods in which protection from cleavage agents is used to detect mismatched bases in RNA/RNA or RNA/DNA heteroduplexes (Myers et al. (1985) Science 230:1242). In general, the art technique of “mismatch cleavage” starts by providing heteroduplexes of formed by hybridizing (labeled) RNA or DNA containing the wild-type TWIK-7 sequence with potentially mutant RNA or DNA obtained from a tissue sample. The double-stranded duplexes are treated with an agent which cleaves single-stranded regions of the duplex such as which will exist due to basepair mismatches between the control and sample strands. For instance, RNA/DNA duplexes can be treated with RNase and DNA/DNA hybrids treated with S1 nuclease to enzymatically digesting the mismatched regions. In other embodiments, either DNA/DNA or RNA/DNA duplexes can be treated with hydroxylamine or osmium tetroxide and with piperidine in order to digest mismatched regions. After digestion of the mismatched regions, the resulting material is then separated by size on denaturing polyacrylamide gels to determine the site of mutation. See, for example, Cotton et al. (1988) Proc. Natl. Acad. Sci. USA 85:4397; Saleeba et al. (1992) Methods Enzymol. 217:286-295. In a preferred embodiment, the control DNA or RNA can be labeled for detection.

[0588] In still another embodiment, the mismatch cleavage reaction employs one or more proteins that recognize mismatched base pairs in double-stranded DNA (so called “DNA mismatch repair” enzymes) in defined systems for detecting and mapping point mutations in TWIK-7 cDNAs obtained from samples of cells. For example, the mutY enzyme of E. coli cleaves A at G/A mismatches and the thymidine DNA glycosylase from HeLa cells cleaves T at G/T mismatches (Hsu et al. (1994) Carcinogenesis 15:1657-1662). According to an exemplary embodiment, a probe based on a TWIK-7 sequence, e.g., a wild-type TWIK-7 sequence, is hybridized to a cDNA or other DNA product from a test cell(s). The duplex is treated with a DNA mismatch repair enzyme, and the cleavage products, if any, can be detected from electrophoresis protocols or the like. See, for example, U.S. Pat. No. 5,459,039.

[0589] In other embodiments, alterations in electrophoretic mobility will be used to identify mutations in TWIK-7 genes. For example, single strand conformation polymorphism (SSCP) may be used to detect differences in electrophoretic mobility between mutant and wild type nucleic acids (Orita et al. (1989) Proc Natl. Acad. Sci USA: 86:2766, see also Cotton (1993) Mutat. Res. 285:125-144; and Hayashi (1992) Genet. Anal. Tech. Appl. 9:73-79). Single-stranded DNA fragments of sample and control TWIK-7 nucleic acids will be denatured and allowed to renature. The secondary structure of single-stranded nucleic acids varies according to sequence, the resulting alteration in electrophoretic mobility enables the detection of even a single base change. The DNA fragments may be labeled or detected with labeled probes. The sensitivity of the assay may be enhanced by using RNA (rather than DNA), in which the secondary structure is more sensitive to a change in sequence. In a preferred embodiment, the subject method utilizes heteroduplex analysis to separate double stranded heteroduplex molecules on the basis of changes in electrophoretic mobility (Keen et al. (1991) Trends Genet 7:5).

[0590] In yet another embodiment the movement of mutant or wild-type fragments in polyacrylamide gels containing a gradient of denaturant is assayed using denaturing gradient gel electrophoresis (DGGE) (Myers et al. (1985) Nature 313:495). When DGGE is used as the method of analysis, DNA will be modified to insure that it does not completely denature, for example by adding a GC clamp of approximately 40 bp of high-melting GC-rich DNA by PCR. In a further embodiment, a temperature gradient is used in place of a denaturing gradient to identify differences in the mobility of control and sample DNA (Rosenbaum and Reissner (1987) Biophys Chem 265:12753).

[0591] Examples of other techniques for detecting point mutations include, but are not limited to, selective oligonucleotide hybridization, selective amplification, or selective primer extension. For example, oligonucleotide primers may be prepared in which the known mutation is placed centrally and then hybridized to target DNA under conditions which permit hybridization only if a perfect match is found (Saiki et al. (1986) Nature 324:163); Saiki et al. (1989) Proc. Natl. Acad. Sci. USA 86:6230). Such allele specific oligonucleotides are hybridized to PCR amplified target DNA or a number of different mutations when the oligonucleotides are attached to the hybridizing membrane and hybridized with labeled target DNA.

[0592] Alternatively, allele specific amplification technology which depends on selective PCR amplification may be used in conjunction with the instant invention. Oligonucleotides used as primers for specific amplification may carry the mutation of interest in the center of the molecule (so that amplification depends on differential hybridization) (Gibbs et al. (1989) Nucleic Acids Res. 17:2437-2448) or at the extreme 3′ end of one primer where, under appropriate conditions, mismatch can prevent, or reduce polymerase extension (Prossner (1993) Tibtech 11:238). In addition it may be desirable to introduce a novel restriction site in the region of the mutation to create cleavage-based detection (Gasparini et al. (1992) Mol. Cell Probes 6:1). It is anticipated that in certain embodiments amplification may also be performed using Taq ligase for amplification (Barany (1991) Proc. Natl. Acad. Sci USA 88:189). In such cases, ligation will occur only if there is a perfect match at the 3′ end of the 5′ sequence making it possible to detect the presence of a known mutation at a specific site by looking for the presence or absence of amplification.

[0593] The methods described herein may be performed, for example, by utilizing pre-packaged diagnostic kits comprising at least one probe nucleic acid or antibody reagent described herein, which may be conveniently used, e.g., in clinical settings to diagnose patients exhibiting symptoms or family history of a disease or illness involving a TWIK-7 gene.

[0594] Furthermore, any cell type or tissue in which TWIK-7 is expressed may be utilized in the prognostic assays described herein.

[0595] 3. Monitoring of Effects During Clinical Trials

[0596] Monitoring the influence of agents (e.g., drugs) on the expression or activity of a TWIK-7 protein (e.g., the modulation of cell proliferation and/or migration) can be applied not only in basic drug screening, but also in clinical trials. For example, the effectiveness of an agent determined by a screening assay as described herein to increase TWIK-7 gene expression, protein levels, or upregulate TWIK-7 activity, can be monitored in clinical trials of subjects exhibiting decreased TWIK-7 gene expression, protein levels, or downregulated TWIK-7 activity. Alternatively, the effectiveness of an agent determined by a screening assay to decrease TWIK-7 gene expression, protein levels, or downregulate TWIK-7 activity, can be monitored in clinical trials of subjects exhibiting increased TWIK-7 gene expression, protein levels, or upregulated TWIK-7 activity. In such clinical trials, the expression or activity of a TWIK-7 gene, and preferably, other genes that have been implicated in, for example, a TWIK-7-associated disorder can be used as a “read out” or markers of the phenotype of a particular cell.

[0597] For example, and not by way of limitation, genes, including TWIK-7, that are modulated in cells by treatment with an agent (e.g., compound, drug or small molecule) which modulates TWIK-7 activity (e.g., identified in a screening assay as described herein) can be identified. Thus, to study the effect of agents on TWIK-7-associated disorders (e.g., disorders characterized by deregulated cell proliferation and/or migration), for example, in a clinical trial, cells can be isolated and RNA prepared and analyzed for the levels of expression of TWIK-7 and other genes implicated in the TWIK-7-associated disorder, respectively. The levels of gene expression (e.g., a gene expression pattern) can be quantified by northern blot analysis or RT-PCR, as described herein, or alternatively by measuring the amount of protein produced, by one of the methods as described herein, or by measuring the levels of activity of TWIK-7 or other genes. In this way, the gene expression pattern can serve as a marker, indicative of the physiological response of the cells to the agent. Accordingly, this response state may be determined before, and at various points during treatment of the individual with the agent.

[0598] In a preferred embodiment, the present invention provides a method for monitoring the effectiveness of treatment of a subject with an agent (e.g., an agonist, antagonist, peptidomimetic, protein, peptide, nucleic acid, small molecule, or other drug candidate identified by the screening assays described herein) including the steps of (i) obtaining a pre-administration sample from a subject prior to administration of the agent; (ii) detecting the level of expression of a TWIK-7 protein, mRNA, or genomic DNA in the preadministration sample; (iii) obtaining one or more post-administration samples from the subject; (iv) detecting the level of expression or activity of the TWIK-7 protein, mRNA, or genomic DNA in the post-administration samples; (v) comparing the level of expression or activity of the TWIK-7 protein, mRNA, or genomic DNA in the pre-administration sample with the TWIK-7 protein, mRNA, or genomic DNA in the post administration sample or samples; and (vi) altering the administration of the agent to the subject accordingly. For example, increased administration of the agent may be desirable to increase the expression or activity of TWIK-7 to higher levels than detected, i.e., to increase the effectiveness of the agent. Alternatively, decreased administration of the agent may be desirable to decrease expression or activity of TWIK-7 to lower levels than detected, i.e. to decrease the effectiveness of the agent. According to such an embodiment, TWIK-7 expression or activity may be used as an indicator of the effectiveness of an agent, even in the absence of an observable phenotypic response.

[0599] D. Methods of Treatment:

[0600] The present invention provides for both prophylactic and therapeutic methods of treating a subject at risk of (or susceptible to) a disorder or having a disorder associated with aberrant or unwanted TWIK-7 expression or activity, e.g. a CNS disorder, a cardiovascular disorder, a pain disorder, or a cellular proliferation, growth, differentiation, or migration disorder. With regards to both prophylactic and therapeutic methods of treatment, such treatments may be specifically tailored or modified, based on knowledge obtained from the field of pharmacogenomics. “Pharmacogenomics”, as used herein, refers to the application of genomics technologies such as gene sequencing, statistical genetics, and gene expression analysis to drugs in clinical development and on the market. More specifically, the term refers the study of how a patient's genes determine his or her response to a drug (e.g., a patient's “drug response phenotype”, or “drug response genotype”). Thus, another aspect of the invention provides methods for tailoring an individual's prophylactic or therapeutic treatment with either the TWIK-7 molecules of the present invention or TWIK-7 modulators according to that individual's drug response genotype. Pharmacogenomics allows a clinician or physician to target prophylactic or therapeutic treatments to patients who will most benefit from the treatment and to avoid treatment of patients who will experience toxic drug-related side effects.

[0601] 1. Prophylactic Methods

[0602] In one aspect, the invention provides a method for preventing in a subject, a disease or condition associated with an aberrant or unwanted TWIK-7 expression or activity, by administering to the subject a TWIK-7 or an agent which modulates TWIK-7 expression or at least one TWIK-7 activity. Subjects at risk for a disease which is caused or contributed to by aberrant or unwanted TWIK-7 expression or activity can be identified by, for example, any or a combination of diagnostic or prognostic assays as described herein. Administration of a prophylactic agent can occur prior to the manifestation of symptoms characteristic of the TWIK-7 aberrancy, such that a disease or disorder is prevented or, alternatively, delayed in its progression. Depending on the type of TWIK-7 aberrancy, for example, a TWIK-7, TWIK-7 agonist or TWIK-7 antagonist agent can be used for treating the subject. The appropriate agent can be determined based on screening assays described herein.

[0603] 2. Therapeutic Methods

[0604] Another aspect of the invention pertains to methods of modulating TWIK-7 expression or activity for therapeutic purposes. Accordingly, in an exemplary embodiment, the modulatory method of the invention involves contacting a cell with a TWIK-7 or agent that modulates one or more of the activities of TWIK-7 protein activity associated with the cell. An agent that modulates TWIK-7 protein activity can be an agent as described herein, such as a nucleic acid or a protein, a naturally-occurring target molecule of a TWIK-7 protein (e.g., a TWIK-7 substrate), a TWIK-7 antibody, a TWIK-7 agonist or antagonist, a peptidomimetic of a TWIK-7 agonist or antagonist, or other small molecule. In one embodiment, the agent stimulates one or more TWIK-7 activities. Examples of such stimulatory agents include active TWIK-7 protein and a nucleic acid molecule encoding TWIK-7 that has been introduced into the cell. In another embodiment, the agent inhibits one or more TWIK-7 activities. Examples of such inhibitory agents include antisense TWIK-7 nucleic acid molecules, anti-TWIK-7 antibodies, and TWIK-7 inhibitors. These modulatory methods can be performed in vitro (e.g., by culturing the cell with the agent) or, alternatively, in vivo (e.g., by administering the agent to a subject). As such, the present invention provides methods of treating an individual afflicted with a disease or disorder characterized by aberrant or unwanted expression or activity of a TWIK-7 protein or nucleic acid molecule. In one embodiment, the method involves administering an agent (e.g., an agent identified by a screening assay described herein), or combination of agents that modulates (e.g., upregulates or downregulates) TWIK-7 expression or activity. In another embodiment, the method involves administering a TWIK-7 protein or nucleic acid molecule as therapy to compensate for reduced, aberrant, or unwanted TWIK-7 expression or activity.

[0605] Stimulation of TWIK-7 activity is desirable in situations in which TWIK-7 is abnormally downregulated and/or in which increased TWIK-7 activity is likely to have a beneficial effect. Likewise, inhibition of TWIK-7 activity is desirable in situations in which TWIK-7 is abnormally upregulated and/or in which decreased TWIK-7 activity is likely to have a beneficial effect.

[0606] 3. Pharmacogenomics

[0607] The TWIK-7 molecules of the present invention, as well as agents, or modulators which have a stimulatory or inhibitory effect on TWIK-7 activity (e.g., TWIK-7 gene expression) as identified by a screening assay described herein can be administered to individuals to treat (prophylactically or therapeutically) TWIK-7-associated disorders (e.g., proliferative disorders) associated with aberrant or unwanted TWIK-7 activity. In conjunction with such treatment, pharmacogenomics (i.e., the study of the relationship between an individual's genotype and that individual's response to a foreign compound or drug) may be considered. Differences in metabolism of therapeutics can lead to severe toxicity or therapeutic failure by altering the relation between dose and blood concentration of the pharmacologically active drug. Thus, a physician or clinician may consider applying knowledge obtained in relevant pharmacogenomics studies in determining whether to administer a TWIK-7 molecule or TWIK-7 modulator as well as tailoring the dosage and/or therapeutic regimen of treatment with a TWIK-7 molecule or TWIK-7 modulator.

[0608] Pharmacogenomics deals with clinically significant hereditary variations in the response to drugs due to altered drug disposition and abnormal action in affected persons. See, for example, Eichelbaum, M. et al. (1996) Clin. Exp. Pharmacol. Physiol. 23(10-11): 983-985 and Linder, M. W. et al. (1997) Clin. Chem. 43(2):254-266. In general, two types of pharmacogenetic conditions can be differentiated. Genetic conditions transmitted as a single factor altering the way drugs act on the body (altered drug action) or genetic conditions transmitted as single factors altering the way the body acts on drugs (altered drug metabolism). These pharmacogenetic conditions can occur either as rare genetic defects or as naturally-occurring polymorphisms. For example, glucose-6-phosphate dehydrogenase deficiency (G6PD) is a common inherited enzymopathy in which the main clinical complication is haemolysis after ingestion of oxidant drugs (anti-malarials, sulfonamides, analgesics, nitrofurans) and consumption of fava beans.

[0609] One pharmacogenomics approach to identifying genes that predict drug response, known as “a genome-wide association”, relies primarily on a high-resolution map of the human genome consisting of already known gene-related markers (e.g., a “bi-allelic” gene marker map which consists of 60,000-100,000 polymorphic or variable sites on the human genome, each of which has two variants.) Such a high-resolution genetic map can be compared to a map of the genome of each of a statistically significant number of patients taking part in a Phase II/III drug trial to identify markers associated with a particular observed drug response or side effect. Alternatively, such a high resolution map can be generated from a combination of some ten-million known single nucleotide polymorphisms (SNPs) in the human genome. As used herein, a “SNP” is a common alteration that occurs in a single nucleotide base in a stretch of DNA. For example, a SNP may occur once per every 1000 bases of DNA. A SNP may be involved in a disease process, however, the vast majority may not be disease-associated. Given a genetic map based on the occurrence of such SNPs, individuals can be grouped into genetic categories depending on a particular pattern of SNPs in their individual genome. In such a manner, treatment regimens can be tailored to groups of genetically similar individuals, taking into account traits that may be common among such genetically similar individuals.

[0610] Alternatively, a method termed the “candidate gene approach”, can be utilized to identify genes that predict drug response. According to this method, if a gene that encodes a drugs target is known (e.g., a TWIK-7 protein of the present invention), all common variants of that gene can be fairly easily identified in the population and it can be determined if having one version of the gene versus another is associated with a particular drug response.

[0611] As an illustrative embodiment, the activity of drug metabolizing enzymes is a major determinant of both the intensity and duration of drug action. The discovery of genetic polymorphisms of drug metabolizing enzymes (e.g., N-acetyltransferase 2 (NAT 2) and cytochrome P450 enzymes CYP2D6 and CYP2C19) has provided an explanation as to why some patients do not obtain the expected drug effects or show exaggerated drug response and serious toxicity after taking the standard and safe dose of a drug. These polymorphisms are expressed in two phenotypes in the population, the extensive metabolizer (EM) and poor metabolizer (PM). The prevalence of PM is different among different populations. For example, the gene coding for CYP2D6 is highly polymorphic and several mutations have been identified in PM, which all lead to the absence of functional CYP2D6. Poor metabolizers of CYP2D6 and CYP2C19 quite frequently experience exaggerated drug response and side effects when they receive standard doses. If a metabolite is the active therapeutic moiety, PM show no therapeutic response, as demonstrated for the analgesic effect of codeine mediated by its CYP2D6-formed metabolite morphine. The other extreme are the so called ultra-rapid metabolizers who do not respond to standard doses. Recently, the molecular basis of ultra-rapid metabolism has been identified to be due to CYP2D6 gene amplification.

[0612] Alternatively, a method termed the “gene expression profiling”, can be utilized to identify genes that predict drug response. For example, the gene expression of an animal dosed with a drug (e.g., a TWIK-7 molecule or TWIK-7 modulator of the present invention) can give an indication whether gene pathways related to toxicity have been turned on.

[0613] Information generated from more than one of the above pharmacogenomics approaches can be used to determine appropriate dosage and treatment regimens for prophylactic or therapeutic treatment an individual. This knowledge, when applied to dosing or drug selection, can avoid adverse reactions or therapeutic failure and thus enhance therapeutic or prophylactic efficiency when treating a subject with a TWIK-7 molecule or TWIK-7 modulator, such as a modulator identified by one of the exemplary screening assays described herein.

[0614] This invention is further illustrated by the following examples which should not be construed as limiting. The contents of all references, patents and published patent applications cited throughout this application, as well as the Figures and the Sequence Listing, are incorporated herein by reference.

### EXAMPLES

### Example 1

### Identification and Characterization of Human TWIK-7 cDNA

[0615] In this example, the identification and characterization of the gene encoding human TWIK-7 (clone Fbh17827) is described.

[0616] Isolation of the TWIK-7 cDNA

[0617] The invention is based, at least in part, on the discovery of a human gene encoding a novel protein, referred to herein as TWIK-7. The entire sequence of the human clone Fbh17827 was determined and found to contain an open reading frame termed human “TWIK-7.”

[0618] The nucleotide sequence encoding the human TWIK-7 protein is shown in FIGS. 9A-B and is set forth as SEQ ID NO:14. The protein encoded by this nucleic acid comprises about 431 amino acids and has the amino acid sequence shown in FIGS. 9A-B and set forth as SEQ ID NO:15. The coding region (open reading frame) of SEQ ID NO:14 is set forth as SEQ ID NO:16.

[0619] Analysis of the Human TWIK-7 Molecule

[0620] A BLASTN 2.0 search against the NRN database, using a score of 100 and a wordlength of 12 (Altschul et al. (1990) J. Mol. Biol. 215:403) of the nucleotide sequence of human TWIK-7 revealed that human TWIK-7 is 55% identical to Streptomyces violaceoruber Tu22 granaticin biosynthetic gene cluster (Accession Number AJ011500) over nucleotides 15-1807, is 55% identical over nucleotides 12-1710, is 55% identical over nucleotides 25-1107, is 54% identical over nucleotides 343-1689, is 54% identical over nucleotides 27-1812, is 54% identical over nucleotides 56-1821, is 53% identical over nucleotides 2-1815, is 53% identical over nucleotides 56-1811, is 53% identical over nucleotides 56-1685, is 56% identical over nucleotides 1809-62, is 54% identical over nucleotides 1185-9, is 54% identical over nucleotides 1709-117, is 53% identical over nucleotides 1759-128, is 55% identical over nucleotides 889-21, and is 53% identical over nucleotides 1783-248, is 55% identical over nucleotides 843-363. This search further revealed that human TWIK-7 is 56% identical to Sequence 2 from Patent WO9516779 (Accession Number A45258) over nucleotides 13-1815, is 55% identical over nucleotides 6-1842, is 55% identical over nucleotides 1-1809, is 55% identical over nucleotides 1816-10, and is 54% identical over nucleotides 1823-521.

[0621] A BLASTN 2.0 search against the dbEST database, using a score of 100 and a wordlength of 12 (Altschul et al. (1990) J. Mol. Biol. 215:403) of the nucleotide sequence of human TWIK-7 revealed that human TWIK-7 is 94% identical to UI-M-BH2.2-ao1-b-03-0-UI.s1 NIH_BMAP_M_S3.2 Mus musculus cDNA clone UI-M-BH2.2-ao1-b-03-0-UI 3′, mRNA sequence (Accession Number AW122613) over nucleotides 1766-1429, and is 57% identical over nucleotides 737-395. This search further revealed that human TWIK-7 is 93% identical to UI-R-C2-mq-e-12-0-UI.s1 UI-R-C2 Rattus norvegicus cDNA clone UI-R-C2-mq-e-12-0-UI 3′ over nucleotides 1766-1429, and is 56% identical over nucleotides 682-395. This search further revealed that human TWIK-7 is 99% identical to wb18h05.x1 NCI_CGAP_GC6 Homo sapiens cDNA clone IMAGE:2306073 3′, mRNA sequence (Accession Number AI825537) over nucleotides 1895-1675, and is 64% identical over nucleotides 779-663.

[0622] A BLASTN 2.0 search against the PatentDbPreviewNuc database, using a score of 100 and a wordlength of 12 (Altschul et al. (1990) J. Mol. Biol. 215:403) of the nucleotide sequence of human TWIK-7 revealed that human TWIK-7 is 55% identical to METH1 and METH2 polynucleotides (Accession Number AC28375)(WO99/37660) over nucleotides 2-1799, is 54% identical over nucleotides 345-1846, is 54% identical over nucleotides 1828-5, and is 55% identical over nucleotides 1160-13.

[0623] A BLASTN 2.0 search against the gsnuc database, using a score of 100 and a wordlength of 12 (Altschul et al. (1990) J. Mol. Biol. 215:403) of the nucleotide sequence of human TWIK-7 revealed that human TWIK-7 is 54% identical to BamHI J-1 fragment carrying sequence characteristic of productive pseudorabies virus (Accession Number Q10212) over nucleotides 438-1815, is 56% identical over nucleotides 10-2540, is 56% identical over nucleotides 1923-15, and is 54% identical over nucleotides 1859-112. This search further revealed that human TWIK-7 is 54% identical to BamHI J-1 fragment carrying sequences characteristic of latent pseudorabies virus (Accession Number Q10543) over nucleotides 438-1815, is 56% identical over nucleotides 10-740, is 56% identical over nucleotides 1923-15, and is 54% identical over nucleotides 1859-112.

[0624] A BLASTX 2.0 search against the NRP/protot database, using a score of 100, a wordlength of 3, and a Blosum 62 matrix (Altschul et al. (1990) J. Mol. Biol. 215:403), of the translated nucleotide sequence of human TWIK-7 revealed that human TWIK-7 is 37% identical to Caenorhabditis elegans ‘similar to potassium channel protein’ (Accession Number Z75543) over nucleotides 541-1413. This search further revealed that human TWIK-7 is 28% identical to Boreogadus saida antifreeze glycopeptide AFGP polyprotein precursor (Accession Number U43200) over translated nucleotides 335-1711, is 28% identical over translated nucleotides 413-1750, is 27% identical over translated nucleotides 113-1582, is 26% identical over translated nucleotides 254-1708, is 27% identical over translated nucleotides 233-1600, is 32% identical over translated nucleotides 32-1432, is 27% identical over translated nucleotides 572-1837, is 29% identical over translated nucleotides 1127-1843, is 26% identical over translated nucleotides 11-826, is 27% identical over translated nucleotides 549-100, is 25% identical over translated nucleotides 813-28, is 29% identical over translated nucleotides 579-70, is 29% identical over translated nucleotides 579-28, is 31% identical over translated nucleotides 552-28, is 27% identical over translated nucleotides 579-133, is 30% identical over translated nucleotides 552-28, is 29% identical over translated nucleotides 549-88, is 30% identical over translated nucleotides 555-82, is 22% identical over translated nucleotides 1199-558, is 23% identical over translated nucleotides 1199-588, is 30% identical over translated nucleotides 555-79, is 22% identical over translated nucleotides 1142-558, is 34% identical over translated nucleotides 579-337, is 22% identical over translated nucleotides 1813-992, is 23% identical over translated nucleotides 1219-518, is 21% identical over translated nucleotides 1747-641, is 23% identical over translated nucleotides 1842-1408, is 22% identical over translated nucleotides 1204-518, is 27% identical over translated nucleotides 785-582, and is 27% identical over translated nucleotides 1842-1648.

[0625] The human TWIK-7 nucleic acid sequence was aligned with the nucleic acid sequence of Homo sapiens TWIK-related acid sensitive K+ channel (TASK) mRNA (Accession Number AF006823), using the GAP program in the GCG software package (nwsgapDNA matrix), a gap weight of 50, and a length weight of 3 (FIGS. 11A-11C). This alignment revealed that human TWIK-7 is 48.317% identical to Accession Number AF006823.

[0626] The human TWIK-7 amino acid sequence was aligned with the amino acid sequence of Homo sapiens TWIK related acid sensitive K+ channel (Accession Number AAC51777), using the GAP program in the GCG software package (Blosum 62 matrix), a gap weight of 12, and a length weight of 4 (FIGS. 12A-12B). This alignment revealed that human TWIK-7 is 25.886% identical to Accession Number AAC51777.

[0627] An alignment of the human TWIK-7 amino acid sequence with the amino acid sequences of TWIK-1 from Mus musculus (Accession No. AF006823), and of TWIK-related acid-sensitive K+ channel (Accession No. AF006823) from Homo sapiens, using the CLUSTAL W (1.74) multiple sequence alignment program, is depicted in FIG. 15.

[0628] A search was performed against the Memsat database (FIG. 13), resulting in the identification of four transmembrane domains in the amino acid sequence of human TWIK-7 (SEQ ID NO:15) at about residues 39-60, 144-165, 216-235, and 281-302, and two P-loop domains at about residues 119-135 and 247-263.

[0629] A search was also performed against the ProDom database resulting in the identification of a potassium channel protein domain in the amino acid sequence of human TWIK-7 (SEQ ID NO:15) at about residues 34-313 (score=258). The results of the search are set forth in FIG. 14.

[0630] Tissue Distribution of TWIK-7 mRNA

[0631] This example describes the tissue distribution of TWIK-7 mRNA, as was determined by Polymerase Chain Reaction (PCR) on cDNA libraries using oligonucleotide primers based on the human TWIK-7 sequence. The human TWIK-7 gene is strongly expressed in fetal brain, in cerebellum, in T24 bladder carcinoma cells, in A549 lung carcinoma cells, in spinal cord, in fetal dorsal spinal cord, in dorsal root ganglia, in prostate, in uterus, in mammary gland, in normal breast and ovarian epithelia, in spleen, in stomach, in small intestine, and in Th-2 induced T cells. The human TWIK-7 was less strongly expressed in salivary gland, in heart, in thymus, in normal megakaryocytes, in lung, in colon carcinoma, in PTH osteo cells, in erythroblasts, in IBD colon, and in brain subcortical white matter.

[0632] For in situ analysis, various tissues, e.g. tissues obtained from brain, are first frozen on dry ice. Ten-micrometer-thick sections of the tissues are postfixed with 4% formaldehyde in DEPC treated 1×phosphate-buffered saline at room temperature for 10 minutes before being rinsed twice in DEPC 1×phosphate-buffered saline and once in 0.1 M triethanolamine-HCl (pH 8.0). Following incubation in 0.25% acetic anhydride-0.1 M triethanolamine-HCl for 10 minutes, sections are rinsed in DEPC 2×SSC (1×SSC is 0.15M NaCl plus 0.015M sodium citrate). Tissue is then dehydrated through a series of ethanol washes, incubated in 100% chloroform for 5 minutes, and then rinsed in 100% ethanol for 1 minute and 95% ethanol for 1 minute and allowed to air dry.

[0633] Hybridizations are performed with ³⁵S-radiolabeled (5×10⁷ cpm/ml) cRNA probes. Probes are incubated in the presence of a solution containing 600 mM NaCl, 10 mM Tris (pH 7.5), 1 mM EDTA, 0.01% sheared salmon sperm DNA, 0.01% yeast tRNA, 0.05% yeast total RNA type X1, 1×Denhardt's solution, 50% formamide, 10% dextran sulfate, 100 mM dithiothreitol, 0.1% sodium dodecyl sulfate (SDS), and 0.1% sodium thiosulfate for 18 hours at 55° C.

[0634] After hybridization, slides are washed with 2×SSC. Sections are then sequentially incubated at 37° C. in TNE (a solution containing 10 mM Tris-HCl (pH 7.6), 500 mM NaCl, and 1 mM EDTA), for 10 minutes, in TNE with 10 μg of RNase A per ml for 30 minutes, and finally in TNE for 10 minutes. Slides are then rinsed with 2×SSC at room temperature, washed with 2×SSC at 50° C. for 1 hour, washed with 0.2×SSC at 55° C. for 1 hour, and 0.2×SSC at 60° C. for 1 hour. Sections are then dehydrated rapidly through serial ethanol-0.3 M sodium acetate concentrations before being air dried and exposed to Kodak Biomax MR scientific imaging film for 24 hours and subsequently dipped in NB-2 photoemulsion and exposed at 4° C. for 7 days before being developed and counter stained.

[0635] The human TWIK-7 gene is expressed at very high levels in brain. Other organs with lower levels of expression of the human TWIK-7 gene are spinal cord, skin and testis. In situ hybridization experiments showed that human TWIK-7 is expressed in trigeminal (TRG) and dorsal root ganglion (DRG) neurons, in spinal cord and brain. This gene is downregulated in rodent DRG neurons after 2, 7, and 14 days post-axotomy of the sciatic nerve. Expression of human TWIK-7 is also down regulated in DRG neurons in rodent models of inflammatory and neuropathic pain.

### Example 2

### Expression of Recombinant TWIK-7 Protein in Bacterial Cells

[0636] In this example, TWIK-7 is expressed as a recombinant glutathione-S-transferase (GST) fusion polypeptide in E. coli and the fusion polypeptide is isolated and characterized. Specifically, TWIK-7 is fused to GST and this fusion polypeptide is expressed in E. coli, e.g, strain PEB199. Expression of the GST-TWIK-7 fusion protein in PEB199 is induced with IPTG. The recombinant fusion polypeptide is purified from crude bacterial lysates of the induced PEB199 strain by affinity chromatography on glutathione beads. Using polyacrylamide gel electrophoretic analysis of the polypeptide purified from the bacterial lysates, the molecular weight of the resultant fusion polypeptide is determined.

### Example 3

### Expression of Recombinant TWIK-7 Protein in COS Cells

[0637] To express the TWIK-7 gene in COS cells, the pcDNA/Amp vector by Invitrogen Corporation (San Diego, Calif.) is used. This vector contains an SV40 origin of replication, an ampicillin resistance gene, an E. coli replication origin, a CMV promoter followed by a polylinker region, and an SV40 intron and polyadenylation site. A DNA fragment encoding the entire TWIK-7 protein and an HA tag (Wilson et al. (1984) Cell 37:767) or a FLAG tag fused in-frame to its 3′ end of the fragment is cloned into the polylinker region of the vector, thereby placing the expression of the recombinant protein under the control of the CMV promoter.

[0638] To construct the plasmid, the TWIK-7 DNA sequence is amplified by PCR using two primers. The 5′ primer contains the restriction site of interest followed by approximately twenty nucleotides of the TWIK-7 coding sequence starting from the initiation codon; the 3′ end sequence contains complementary sequences to the other restriction site of interest, a translation stop codon, the HA tag or FLAG tag and the last 20 nucleotides of the TWIK-7 coding sequence. The PCR amplified fragment and the pCDNA/Amp vector are digested with the appropriate restriction enzymes and the vector is dephosphorylated using the CIAP enzyme (New England Biolabs, Beverly, Mass.). Preferably the two restriction sites chosen are different so that the TWIK-7 gene is inserted in the correct orientation. The ligation mixture is transformed into E. coli cells (strains HB101, DH5□, SURE, available from Stratagene Cloning Systems, La Jolla, Calif., can be used), the transformed culture is plated on ampicillin media plates, and resistant colonies are selected. Plasmid DNA is isolated from transformants and examined by restriction analysis for the presence of the correct fragment.

[0639] COS cells are subsequently transfected with the TWIK-7-pcDNA/Amp plasmid DNA using the calcium phosphate or calcium chloride co-precipitation methods, DEAE-dextran-mediated transfection, lipofection, or electroporation. Other suitable methods for transfecting host cells can be found in Sambrook, J., Fritsh, E. F., and Maniatis, T. Molecular Cloning: A Laboratory Manual. 2nd, ed., Cold Spring Harbor Laboratory, Cold Spring Harbor Laboratory Press, Cold Spring Harbor, N.Y., 1989. The expression of the TWIK-7 polypeptide is detected by radiolabeling (³⁵S-methionine or ³⁵S-cysteine available from NEN, Boston, Mass., can be used) and immunoprecipitation (Harlow, E. and Lane, D. Antibodies: A Laboratory Manual, Cold Spring Harbor Laboratory Press, Cold Spring Harbor, N.Y., 1988) using an HA specific monoclonal antibody. Briefly, the cells are labeled for 8 hours with ³⁵S-methionine (or ³⁵S-cysteine). The culture media are then collected and the cells are lysed using detergents (RIPA buffer, 150 mM NaCl, 1% NP-40, 0.1% SDS, 0.5% DOC, 50 mM Tris, pH 7.5). Both the cell lysate and the culture media are precipitated with an HA specific monoclonal antibody. Precipitated polypeptides are then analyzed by SDS-PAGE.

[0640] Alternatively, DNA containing the TWIK-7 coding sequence is cloned directly into the polylinker of the pCDNA/Amp vector using the appropriate restriction sites. The resulting plasmid is transfected into COS cells in the manner described above, and the expression of the TWIK-7 polypeptide is detected by radiolabeling and immunoprecipitation using a TWIK-7 specific monoclonal antibody.

### III. 23927, A NOVEL HUMAN ION CHANNEL

### Background of the Invention

[0641] The ion channel family of proteins is a large family of membrane-bound proteins responsible for a wide range of important transport and signaling functions in cells. The ion channel family includes at least three subfamilies: calcium ion channels (i.e., Ca channels), potassium channels (i.e., K channels) and sodium channels (Na channels). Members of the ion channel family are characterized by the presence of six (6) transmembrane helices in which the last two helices flank a loop which determines ion selectivity. In some subfamilies (e.g., Na channels) the domain is repeated four times, whereas in others (e.g., K channels) the protein forms as a tetramer in the membrane.

[0642] Calcium channel proteins are involved in the control of neurotransmitter release from neurons (Williams et al. (1992) Science 257:389-395), and play an important role in the regulation of a variety of cellular functions, including membrane excitability, muscle contraction and synaptic transmission (Mori et al. (1991) Nature 350:398-402). The calcium channel proteins are composed of four (4) tightly-coupled subunits (α1, α2, β and γ), the α1 subunit from each creating the pore for the import of extracellular calcium ions. The α1 subunit shares sequence characteristics with all voltage-dependent cation channels, and exploits the same 6-helix bundle structural motif. In both sodium and calcium channels, this motif is repeated 4 times within the sequence to give a 24-helix bundle. There are several tissue-specific pharmacologically and electrophysiologically distinct isoforms of calcium channels, coded for by separate genes in a multi-gene family. In skeletal muscle, each tightly-bound assembly of α, β and γ subunits associates with 4 others to form a pentameric macromolecule (Koch et al. (1990) J. Biol. Chem. 265:17786-17791). Examples of calcium channels include, but are not limited to, the low-voltage-gated channels and the high-voltage-gated channels. Calcium channels are described in, for example, Davila et al. (1999) Annals New York Acad. Sci. 868:102-17 and McEnery et al. (1998) J. Bioenergetics and Biomembranes 30(4):409-418, the contents of which are incorporated herein by reference.

[0643] Sodium channels are transmembrane (TM) voltage-dependent proteins responsible for the depolarizing phase of the action potential in most electrically excitable cells (George et al. (1992) Proc. Natl. Acad. Sci. USA 89:4893-4897). They may exist in 3 states (Noda et al. (1984) Nature 312:121-127): the resting state, where the channel is closed; the activated state, where the channel is open; and the inactivated state, where the channel is closed. Several different structurally and functionally distinct isoforms are found in mammals, coded for by a multigene family (Rogart et al. (1989) Proc. Natl. Acad. Sci. USA 86:8170-8174), these being responsible for the different types of sodium ion currents found in excitable tissues. The structure of sodium channels is based on 4 internal repeats of a 6-helix bundle (Noda et al. (1986) Nature 320:188-192) (in which 5 of the membrane-spanning segments are hydrophobic and the other is positively charged), forming a 24-helical bundle. The charged segments are believed to be localized within clusters formed by their 5 hydrophobic neighbors. It is postulated that the charged domain may be the voltage sensor region, possibly moving outward on depolarization, causing a conformational change. This model, proposed by (Noda et al., supra), contrasts with that of Sato and Matsumoto (1992) Biochem. Biophys. Res. Commun.. 186:1158-1167), in which the TM segments are juxtaposed octagonally. The basic structural motif (the 6-helix bundle) is also found in potassium and calcium channels.

[0644] Potassium channels are the most diverse group of the ion channel family (possibly as a result of gene duplication and alternative splicing of the genes (Perney and Kaczmarek (1991) Curr. Opin. Cell. Biol. 3:663-670 and Luneau et al. (1991) FEBS Lett. 288:163-167). They are important in shaping the action potential, and in neuronal excitability and plasticity (Tempel et al. (1988) Nature 332:837-839). The potassium channel family is composed of several functionally distinct isoforms, which can be broadly separated into 2 groups (Stuehmer et al. (1989) EMBO J. 8:3225-3244). The first is the practically non-inactivating “delayed” group, the second the rapidly inactivating “transient” group. These are all highly similar proteins, with possibly only small amino acid changes causing the diversity of the voltage-dependent gating mechanism, channel conductance and toxin binding properties. Members of the potassium channel family vary in several ways. Some open in response to depolarization of the plasma membrane; others open in response to hyperpolarization or an increase in intracellular calcium concentration; some can be regulated by binding of a transmitter, together with intracellular kinases; and others are regulated by GTP-binding proteins or other second messengers (Schwarz et al. (1988) Nature 331:137-142 (1988). They are also involved in T-cell activation, and may have a role in target cell lysis by cytotoxic T-lymphocytes (Attali et al. (1992) J. Biol. Chem. 267:8650-8657 (1992). Potassium channels are transmembrane (TM) proteins that contain 6 membrane-spanning α-helical segments, 5 of which are hydrophobic, the other being positively charged. The charged segment is believed to be localized within a cluster formed by the hydrophobic helices. As with Na channels, it is postulated that the charged segment may constitute the voltage sensor region, possibly moving outward on depolarization, causing a conformational change. The 6-helix bundle is a common structural motif in sodium channels (in which it is repeated 4 times within the sequence to form a 24-helix bundle), and in calcium channels (where it also forms a 24-helix bundle, which itself is tightly bound to 3 different subunits).

[0645] Ion channels play a role in regulating ion transport and signaling in virtually every cell in the human body. This fundamental knowledge has fostered an extensive search for modulators of such receptors for use as human therapeutics. In fact, the ion channel superfamily has proven to be among the most successful drug targets. Consequently, it has been recognized that newly isolated ion channels have great potential for drug discovery (e.g., for identifying modulators of such channels for use in regulating a variety of cellular responses.

### Summary of the Invention

[0646] The present invention is based, at least in part, on the discovery of novel ion channel family members, referred to herein as ion channel 23927 or IC23927 or 23927 nucleic acid and protein molecules. The IC23927 molecules of the present invention are useful as targets for developing modulating agents to regulate a variety of cellular processes, including ion transport (e.g., ion conductance), membrane excitability and/or polarization, synaptic transmission, signal transduction (e.g., pain signaling), cell activation, proliferation, growth, differentiation and/or migration as well as muscle contraction. The 23927 nucleic acid and protein molecules (and modulators thereof) are also useful in regulating physiologic processes, for example, pain and/or pain disorders. Accordingly, in one aspect, this invention provides isolated nucleic acid molecules encoding IC23927 proteins or biologically active portions thereof, as well as nucleic acid fragments suitable as primers or hybridization probes for the detection of IC23927-encoding nucleic acids.

[0647] In one embodiment, an IC23927 nucleic acid molecule of the invention is at least 50%, 55%, 60%, 65%, 70%, 75%, 80%, 85%, 90%, 95%, 96%, 97%, 98%, 99% identical to the nucleotide sequence (e.g., to the entire length of the nucleotide sequence) shown in SEQ ID NO:21 or 23 or the nucleotide sequence of the DNA insert of the plasmid deposited with ATCC as Accession Number ______, or a complement thereof.

[0648] In a preferred embodiment, the isolated nucleic acid molecule includes the nucleotide sequence shown SEQ ID NO:21 or 23, or a complement thereof. In another embodiment, the nucleic acid molecule includes SEQ ID NO:23 and nucleotides 1-287 of SEQ ID NO:21. In yet another embodiment, the nucleic acid molecule includes SEQ ID NO:23 and nucleotides 2339-5269 of SEQ ID NO:21. In another preferred embodiment, the nucleic acid molecule consists of the nucleotide sequence shown in SEQ ID NO:21 or 23. In another preferred embodiment, the nucleic acid molecule includes a fragment of at least 2451 nucleotides (e.g., 2451 contiguous nucleotides) of the nucleotide sequence of SEQ ID NO:21 or 23, or a complement thereof.

[0649] In another embodiment, an IC23927 nucleic acid molecule includes a nucleotide sequence encoding a protein having an amino acid sequence sufficiently identical to the amino acid sequence of SEQ ID NO:22 or an amino acid sequence encoded by the DNA insert of the plasmid deposited with ATCC as Accession Number ______. In a preferred embodiment, an IC23927 nucleic acid molecule includes a nucleotide sequence encoding a protein having an amino acid sequence at least 50%, 55%, 60%, 65%, 70%, 75%, 80%, 85%, 90%, 95%, 96%, 97%, 98%, 99% or more identical to the entire length of the amino acid sequence of SEQ ID NO:22 or the amino acid sequence encoded by the DNA insert of the plasmid deposited with ATCC as Accession Number ______.

[0650] In another preferred embodiment, an isolated nucleic acid molecule encodes the amino acid sequence of human IC23927. In yet another preferred embodiment, the nucleic acid molecule includes a nucleotide sequence encoding a protein having the amino acid sequence of SEQ ID NO:22, or the amino acid sequence encoded by the DNA insert of the plasmid deposited with ATCC as Accession Number ______. In yet another preferred embodiment, the nucleic acid molecule is at least 2451 nucleotides in length. In a further preferred embodiment, the nucleic acid molecule is at least 2393 nucleotides in length and encodes a protein having an IC23927 activity (as described herein).

[0651] Another embodiment of the invention features nucleic acid molecules, preferably IC23927 nucleic acid molecules, which specifically detect IC23927 nucleic acid molecules relative to nucleic acid molecules encoding non-IC23927 proteins. For example, in one embodiment, such a nucleic acid molecule is at least 500-600, 600-700, 700-800, 800-900, 900-1000, 1000-1100, 1100-1200, 1200-1300, 1300-1400, 1400-1500, 1500-1600, 1600-1700, 1700-1800, 1800-1900, 1900-2000, 2000-2100, 2200-2300, 2300-2400, 2400-2500 or more nucleotides in length and hybridizes under stringent conditions to a nucleic acid molecule comprising the nucleotide sequence shown in SEQ ID NO:21, the nucleotide sequence of the DNA insert of the plasmid deposited with ATCC as Accession Number ______, or a complement thereof.

[0652] In other preferred embodiments, the nucleic acid molecule encodes a naturally occurring allelic variant of a polypeptide comprising the amino acid sequence of SEQ ID NO:22 or an amino acid sequence encoded by the DNA insert of the plasmid deposited with ATCC as Accession Number ______, wherein the nucleic acid molecule hybridizes to a nucleic acid molecule comprising SEQ ID NO:21 or 23 under stringent conditions.

[0653] Another embodiment of the invention provides an isolated nucleic acid molecule which is antisense to an IC23927 nucleic acid molecule, e.g., the coding strand of an IC23927 nucleic acid molecule.

[0654] Another aspect of the invention provides a vector comprising an IC23927 nucleic acid molecule. In certain embodiments, the vector is a recombinant expression vector. In another embodiment, the invention provides a host cell containing a vector of the invention. In yet another embodiment, the invention provides a host cell containing a nucleic acid molecule of the invention. The invention also provides a method for producing a protein, preferably an IC23927 protein, by culturing in a suitable medium, a host cell, e.g., a mammalian host cell such as a non-human mammalian cell, of the invention containing a recombinant expression vector, such that the protein is produced.

[0655] Another aspect of this invention features isolated or recombinant IC23927 proteins and polypeptides. In one embodiment, an isolated IC23927 protein includes at least one transmembrane domain. In another embodiment, an isolated IC23927 protein includes at least one ion transport protein (ITP) domain. In another embodiment, an isolated IC23927 protein includes at least one site selected from the group consisting of an N-glycosylation site, a protein kinase C phosphorylation site, a casein kinase II phosphorylation site, a tyrosine kinase phosphorylation site, an N-myristoylation site and an amidation site. In yet another embodiment, an isolated IC23927 protein includes at least one transmembrane domain and/or an ITP domain and at least one site selected from the group consisting of an N-glycosylation site, a protein kinase C phosphorylation site, a casein kinase II phosphorylation site, a tyrosine kinase phosphorylation site, an N-myristoylation site and an amidation site.

[0656] In a preferred embodiment, an IC23927 protein includes at least one transmembrane domain and has an amino acid sequence at least about 50%, 55%, 60%, 65%, 70%, 75%, 80%, 85%, 90%, 95%, 96%, 97%, 98%, 99% or more identical to the amino acid sequence of SEQ ID NO:22, or the amino acid sequence encoded by the DNA insert of the plasmid deposited with ATCC as Accession Number ______. In a further preferred embodiment, an IC23927 protein includes an ITP domain and has an amino acid sequence at least about 50%, 55%, 60%, 65%, 70%, 75%, 80%, 85%, 90%, 95%, 96%, 97%, 98%, 99% or more identical to the amino acid sequence of SEQ ID NO:22, or the amino acid sequence encoded by the DNA insert of the plasmid deposited with ATCC as Accession Number ______. In a further preferred embodiment, an IC23927 protein includes at least one transmembrane domain and/or an ITP domain and at least one site selected from the group consisting of an N-glycosylation site, a protein kinase C phosphorylation site, a casein kinase II phosphorylation site, a tyrosine kinase phosphorylation site, an N-myristoylation site and an amidation site and has an amino acid sequence at least about 50%, 55%, 60%, 65%, 70%, 75%, 80%, 85%, 90%, 95%, 96%, 97%, 98%, 99% or more identical to the amino acid sequence of SEQ ID NO:22, or the amino acid sequence encoded by the DNA insert of the plasmid deposited with ATCC as Accession Number ______.

[0657] In another preferred embodiment, an IC23927 protein includes at least one transmembrane domain and/or an ITP domain and has an IC23927 activity (as described herein).

[0658] In yet another preferred embodiment, an IC23927 protein includes at least one transmembrane domain and is encoded by a nucleic acid molecule having a nucleotide sequence which hybridizes under stringent hybridization conditions to a nucleic acid molecule comprising the nucleotide sequence of SEQ ID NO:21 or 23. In a further embodiment, an IC23927 protein includes an ITP domain and is encoded by a nucleic acid molecule having a nucleotide sequence which hybridizes under stringent hybridization conditions to a nucleic acid molecule comprising the nucleotide sequence of SEQ ID NO:21 or 23. In another embodiment, an IC23927 protein includes at least one transmembrane and/or an ITP domain and at least one site selected from the group consisting of an N-glycosylation site, a protein kinase C phosphorylation site, a casein kinase II phosphorylation site, a tyrosine kinase phosphorylation site, an N-myristoylation site and an amidation site and is encoded by a nucleic acid molecule having a nucleotide sequence which hybridizes under stringent hybridization conditions to a nucleic acid molecule comprising the nucleotide sequence of SEQ ID NO:21 or 23.

[0659] In another embodiment, the invention features fragments of the protein having the amino acid sequence of SEQ ID NO:22, wherein the fragment comprises at least 15, 50, 100, 150, 200, 250, 300, 350, 400, 450, 500, 550, 600, 650, 700, 750, 800 or more amino acids (e.g., contiguous amino acids) of the amino acid sequence of SEQ ID NO:22, or an amino acid sequence encoded by the DNA insert of the plasmid deposited with the ATCC as Accession Number ______. In another embodiment, an IC23927 protein has the amino acid sequence of SEQ ID NO:22.

[0660] In another embodiment, the invention features an IC23927 protein which is encoded by a nucleic acid molecule consisting of a nucleotide sequence at least about 50%, 55%, 60%, 65%, 70%, 75%, 80%, 85%, 90%, 95%, 96%, 97%, 98%, 99% or more identical to a nucleotide sequence of SEQ ID NO:21 or 23, or a complement thereof. This invention further features an IC23927 protein, which is encoded by a nucleic acid molecule consisting of a nucleotide sequence which hybridizes under stringent hybridization conditions to a nucleic acid molecule comprising the nucleotide sequence of SEQ ID NO:21 or 23, or a complement thereof.

[0661] The proteins of the present invention or portions thereof, e.g., biologically active portions thereof, can be operatively linked to a non-IC23927 polypeptide (e.g., heterologous amino acid sequences) to form fusion proteins. The invention further features antibodies, such as monoclonal or polyclonal antibodies, that specifically bind proteins of the invention, preferably IC23927 proteins. In addition, the IC23927 proteins or biologically active portions thereof can be incorporated into pharmaceutical compositions, which optionally include pharmaceutically acceptable carriers.

[0662] In another aspect, the present invention provides a method for detecting the presence of an IC23927 nucleic acid molecule, protein, or polypeptide in a biological sample by contacting the biological sample with an agent capable of detecting an IC23927 nucleic acid molecule, protein, or polypeptide such that the presence of an IC23927 nucleic acid molecule, protein or polypeptide is detected in the biological sample.

[0663] In another aspect, the present invention provides a method for detecting the presence of IC23927 activity in a biological sample by contacting the biological sample with an agent capable of detecting an indicator of IC23927 activity such that the presence of IC23927 activity is detected in the biological sample.

[0664] In another aspect, the invention provides a method for modulating IC23927 activity comprising contacting a cell capable of expressing IC23927 with an agent that modulates IC23927 activity such that IC23927 activity in the cell is modulated. In one embodiment, the agent inhibits IC23927 activity. In another embodiment, the agent stimulates IC23927 activity. In one embodiment, the agent is an antibody that specifically binds to an IC23927 protein. In another embodiment, the agent modulates expression of IC23927 by modulating transcription of an IC23927 gene or translation of an IC23927 mRNA. In yet another embodiment, the agent is a nucleic acid molecule having a nucleotide sequence that is antisense to the coding strand of an IC23927 mRNA or an IC23927 gene.

[0665] In one embodiment, the methods of the present invention are used to treat a subject having a disorder characterized by aberrant or unwanted IC23927 protein or nucleic acid expression or activity by administering an agent which is an IC23927 modulator to the subject. In one embodiment, the IC23927 modulator is an IC23927 protein. In another embodiment the IC23927 modulator is an IC23927 nucleic acid molecule. In yet another embodiment, the IC23927 modulator is a peptide, peptidomimetic, or other small molecule. In a preferred embodiment, the disorder characterized by aberrant or unwanted IC23927 protein or nucleic acid expression is a CNS disorder, such as a neurodegenerative disorder, (e.g., Alzheimer's disease), Parkinson's disease, multiple sclerosis, amyotrophic lateral sclerosis, AIDS related dementia, a convulsion, palsy or epilepsy, a psychiatric disorder (e.g., depression, schizophrenic disorders, mania, anxiety disorders, or phobic disorders) or a learning or memory disorder (e.g., amnesia or age-related memory loss) or is a neurological disorder (e.g., migraine). In another embodiment, the disorder characterized by aberrant or unwanted IC23927 activity is a pain disorder (e.g., a disorder characterized by misregulated pain signaling mechanisms). In another embodiment, the disorder characterized by aberrant or unwanted IC23927 activity is a cell activation, proliferation, growth, differentiation, or migration disorder.

[0666] The present invention also provides diagnostic assays for identifying the presence or absence of a genetic alteration characterized by at least one of (i) aberrant modification or mutation of a gene encoding an IC23927 protein; (ii) mis-regulation of the gene; and (iii) aberrant post-translational modification of an IC23927 protein, wherein a wild-type form of the gene encodes a protein with an IC23927 activity.

[0667] In another aspect the invention provides methods for identifying a compound that binds to or modulates the activity of an IC23927 protein, by providing an indicator composition comprising an IC23927 protein having IC23927 activity, contacting the indicator composition with a test compound, and determining the effect of the test compound on IC23927 activity in the indicator composition to identify a compound that modulates the activity of an IC23927 protein.

[0668] In a further aspect, the invention provides a method for identifying a compound which modulates pain comprising contacting a IC23927 polypeptide or a cell which expresses a IC23927 polypeptide with a test compound with a test compound and identifying the compound as a modulator of pain by determining the effect of the test compound on the activity of the polypeptide. In yet another aspect, the invention provides a method for identifying a compound capable of modulating nociception comprising contacting a IC23927 polypeptide or a cell which expresses a IC23927 polypeptide with a test compound and identifying the compound as a modulator of nociception by determining the effect of the test compound on the activity of the polypeptide.

[0669] The present invention further features a method for treating a subject having pain or a pain disorder comprising administering to the subject a IC23927 modulator. In one embodiment, the IC23927 modulator is a small molecule. In another embodiment, the IC23927 modulator is administered in a pharmaceutically acceptable formulation. In yet another embodiment the IC23927 modulator is administered using a gene therapy vector.

[0670] Other features and advantages of the invention will be apparent from the following detailed description and claims.

### Detailed Description of the Invention

[0671] The present invention is based, at least in part, on the discovery of novel molecules, referred to herein as ion channel 23927 or “IC23927” nucleic acid and protein molecules, which are novel members of the ion channel family of proteins and nucleic acid molecules. These novel molecules are capable of, for example, modulating ion transport in a cell (e.g., a neuronal, muscle (e.g., cardiac muscle), or liver cell).

[0672] As used herein, an “ion channel” includes a protein or polypeptide which is involved in receiving, conducting, and transmitting signals in an cell (e.g., an electrically excitable cell, for example, a neuronal or muscle cell). Ion channels can determine membrane excitability (the ability of, for example, a cell to respond to a stimulus and to convert it into a sensory impulse). Ion channels can also influence the resting potential of membranes, wave forms and frequencies of action potentials, and thresholds of excitation. Ion channels are typically expressed in electrically excitable cells, e.g., neuronal cells, and may form heteromultimeric structures (e.g,, composed of more than one type of subunit). Ion channels may also be found in nonexcitable cells (e.g., adipose cells or liver cells), where they may play a role in, for example, signal transduction. As the IC23927 molecules of the present invention may modulate ion channel mediated activities, they may be useful for developing novel diagnostic and therapeutic agents for ion channel associated disorders.

[0673] As used herein, an “ion channel associated disorder” includes a disorder, disease or condition which is characterized by a misregulation of ion channel mediated activity. Ion channel associated disorders include CNS disorders, such as cognitive and neurodegenerative disorders, examples of which include, but are not limited to, Alzheimer's disease, dementias related to Alzheimer's disease (such as Pick's disease), Parkinson's and other Lewy diffuse body diseases, senile dementia, Huntington's disease, Gilles de la Tourette's syndrome, multiple sclerosis, amyotrophic lateral sclerosis, progressive supranuclear palsy, epilepsy, Jakob-Creutzfieldt disease, or AIDS related dementia; autonomic function disorders such as hypertension and sleep disorders, and neuropsychiatric disorders, such as depression, schizophrenia, schizoaffective disorder, korsakoff's psychosis, mania, anxiety disorders, or phobic disorders; leaning or memory disorders, e.g., amnesia or age-related memory loss, attention deficit disorder, psychoactive substance use disorders, anxiety, phobias, panic disorder, as well as bipolar affective disorder, e.g., severe bipolar affective (mood) disorder (BP-1), and bipolar affective neurological disorders, e.g., migraine and obesity. Further CNS-related disorders include, for example, those listed in the American Psychiatric Association's Diagnostic and Statistical manual of Mental Disorders (DSM), the most current version of which is incorporated herein by reference in its entirety.

[0674] Ion channel disorders also include pain disorders. As used herein, the term “pain disorder” includes disorders characterized by aberrant (e.g., excessive or amplified) pain signaling in addition to symptoms and/or phenotypes which result from wild-type, or normal, pain signaling mechanisms. Examples of pain disorders include posttherapeutic neuralgia, diabetic neuropathy, postmastectomy pain syndrome, stump pain, reflex sympathetic dystrophy, trigeminal neuralgia, neuropathic pain, orofacial neuropathic pain, osteoarthritis, rheumatoid arthritis, fibromyalgia syndrome, tension myalgia, Guillian-Barre syndrome, Meralgia paraesthetica, burning mouth syndrome, fibrocitis, myofascial pain syndrome, idiopathic pain disorder, temporomandibular joint syndrome, atypical odontalgia, loin pain, haematuria syndrome, non-cardiac chest pain, low back pain, chronic nonspecific pain, psychogenic pain, musculoskeletal pain disorder, chronic pelvic pain, nonorganic chronic headache, tension-type headache, cluster headache, migraine, complex regional pain syndrome, vaginismus, nerve trunk pain, somatoform pain disorder, cyclical mastalgia, chronic fatigue syndrome, multiple somatization syndrome, chronic pain disorder, somatization disorder, Syndrome X, facial pain, idiopathic pain disorder, posttraumatic rheumatic pain modulation disorder (fibrositis syndrome), hyperalgesia, and Tangier disease. As used herein, the term “pain signaling mechanisms” includes the cellular mechanisms involved in the development and regulation of pain, e.g., pain elicited by noxious chemical, mechanical, or thermal stimuli, in a subject, e.g., a mammal such as a human. In mammals, the initial detection of noxious chemical, mechanical, or thermal stimuli, a process referred to as “nociception”, occurs predominantly at the peripheral terminals of specialized, small diameter sensory neurons. These sensory neurons transmit the information to the central nervous system, evoking a perception of pain or discomfort and initiating appropriate protective reflexes. The IC23927 molecules of the present invention may be present on sensory neurons and, thus, may be involved in detecting, for example, noxious chemical, mechanical, or thermal stimuli and transducing this information into membrane depolarization events. Thus, the IC23927 molecules by participating in pain signaling mechanisms, may modulate pain elicitation and act as targets for developing novel diagnostic targets and therapeutic agents to control pain. Moreover, IC23927 mRNA is predominantly expressed in the brain as compared to other tissues evidencing the usefulness of the IC23927 molecules of the present invention as targets for developing novel diagnostic targets and therapeutic agents to control pain and pain disorders.

[0675] Ion channel disorders also include cellular activation, proliferation, growth, differentiation, or migration disorders. Cellular activation, proliferation, growth, differentiation, or migration disorders include those disorders that affect cell activation, proliferation, growth, differentiation, or migration processes. As used herein, a “cellular activation, proliferation, growth, differentiation, or migration process” is a process by which a cell increases in activity (e.g., a cell-specific activity), number, size or content, by which a cell develops a specialized set of characteristics which differ from that of other cells, or by which a cell moves closer to or further from a particular location or stimulus. The IC23927 molecules of the present invention are also involved in signal transduction mechanisms, which are known to be involved in cellular activation, growth, differentiation, and migration processes. Thus, the IC23927 molecules may modulate activation, cellular growth, differentiation, or migration, and may play a role in disorders characterized by aberrantly regulated activation, growth, differentiation, or migration. Such disorders include cancer, e.g., carcinoma, sarcoma, or leukemia; tumor angiogenesis and metastasis; skeletal dysplasia; neuronal deficiencies resulting from impaired neural induction and patterning; hepatic disorders; cardiovascular disorders; and hematopoietic and/or myeloproliferative disorders.

[0676] As used herein, an “ion channel mediated activity” includes an activity which involves an ion channel, e.g., a calcium channel in a neuronal cell, a muscular cell, or a liver cell, associated with receiving, conducting, and transmitting signals, in, for example, the nervous system. Ion channel mediated activities include release of neurotransmitters or second messenger molecules (e.g., dopamine or norepinephrine), from cells, e.g., neuronal cells; modulation of resting potential of membranes, wave forms and frequencies of action potentials, and thresholds of excitation; participation in signal transduction pathways, and modulation of processes such as integration of sub-threshold synaptic responses and the conductance of back-propagating action potentials in, for example, neuronal cells (e.g., changes in those action potentials resulting in a morphological or differentiative response in the cell).

[0677] The term “family” when referring to the protein and nucleic acid molecules of the invention is intended to mean two or more proteins or nucleic acid molecules having a common structural domain or motif and having sufficient amino acid or nucleotide sequence homology as defined herein. Such family members can be naturally or non-naturally occurring and can be from either the same or different species. For example, a family can contain a first protein of human origin, as well as other, distinct proteins of human origin or alternatively, can contain homologues of non-human origin, e.g., mouse proteins. Members of a family may also have common functional characteristics.

[0678] For example, the family of IC23927 proteins comprise at least one “transmembrane domain” and preferably six, seven, eight, nine, ten, eleven or twelve transmembrane domains. As used herein, the term “transmembrane domain” includes an amino acid sequence of about 10-45 amino acid residues in length which spans the plasma membrane. More preferably, a transmembrane domain includes about at least 12, 15, 20, 25, 30, 35 or 40 amino acid residues and spans the plasma membrane. Transmembrane domains are rich in hydrophobic residues, and typically have an alpha-helical structure. In a preferred embodiment, at least 50%, 60%, 70%, 80%, 90%, 95% or more of the amino acids of a transmembrane domain are hydrophobic, e.g., leucines, isoleucines, tyrosines, or tryptophans. Transmembrane domains are described in, for example, Zagotta et al. (1996) Ann. Rev. Neurosci. 19: 235-263, the contents of which are incorporated herein by reference. Amino acid residues 114-128, 146-168, 178-195, 199-210, 233-254, 298-320, 445-465, 482-502, 510-532, 539-554, 570-594 and 666-687 of the IC23927 protein comprise transmembrane domains (see FIG. 17). Accordingly, IC23927 proteins having at least 50-60% homology, preferably about 60-70%, more preferably about 70-80%, or about 80-90% homology with a transmembrane domain of human IC23927 are within the scope of the invention.

[0679] In another embodiment, an IC23927 molecule of the present invention is identified based on the presence of at least one pore domain between the fifth and sixth transmembrane domains. As used herein, the term “pore domain” includes an overall hydrophobic amino acid sequence which is located between two transmembrane domains of an ion channel protein, preferably transmembrane domains 5 and 6, and which is believed to be a major determinant of ion selectivity and activity in ion channels. Pore domains are described, for example in Vannier et al. (1998) J. Biol. Chem. 273: 8675-8679 and Phillips, A. M. et al. (1992) Neuron 8, 631-642, the contents of which are incorporated herein by reference. Pore domains in the human IC23927 amino acid sequence can be found, for example, from amino acids 269-287 of SEQ ID NO:22 (P1) and from amino acid 637-653 of SEQ ID NO:22 (P2). IC23927 molecules having at least one pore domain are within the scope of the invention.

[0680] In another embodiment, an IC23927 molecule of the present invention is identified based on the presence of at least one N-glycosylation site. As used herein, the term “N-glycosylation site” includes an amino acid sequence of about 4 amino acid residues in length which serves as a potential N-glycosylation site. Preferably, an N-glycosylation site has the consensus sequence N-X-[ST] (where X is any amino acid and [ST] is serine or threonine). More preferably, an N-glycosylation site has the consensus sequence N-{P}-[ST]-{P} (where N is a glycosylation site, {P} is any amino acid sequence but proline and [ST] is serine or threonine). (All consensus sequences used herein are written according to art-recognized designations of amino acid residues). N-glycosylation sites are described in, for example, Prosite PDOC00001 (http://www.expasy.ch/cgi-bin/nicedoc.p1?PDOC00001), the contents of which are incorporated herein by reference. Amino acid residues 599-602, 611 -614, 616-619 and 695-698 of the IC23927 protein comprise N-glycosylation sites. Accordingly, IC23927 proteins having at least one N-glycosylation site are within the scope of the invention.

[0681] In another embodiment, an IC23927 molecule of the present invention is identified based on the presence of at least one protein kinase C (PKC) phosphorylation site. As used herein, the term “PKC phosphorylation site” includes an amino acid sequence of about 3 amino acid residues in length which includes a serine or threonine residue which is potentially phosphorylated by protein kinase C (PKC). Preferably, a PKC phosphorylation site has the consensus sequence [ST]-X-[RK] [where S or T is the phosphorylation site, X is any amino acid and DE is aspartate or glutamate]. PKC phosphorylation sites are described in, for example, Prosite PDOC00001 (http://www.expasy.ch/cgi-bin/nicedoc.p1?PDOC00005), the contents of which are incorporated herein by reference. Amino acid residues 351-353, 359-361, 375-377, 382-384, 395-397, 697-699 and 769-771 of the IC23927 protein comprise PKC phosphorylation sites. Accordingly, IC23927 proteins having at least one PKC phosphorylation site are within the scope of the invention.

[0682] In another embodiment, an IC23927 molecule of the present invention is identified based on the presence of at least one casein kinase II phosphorylation site. As used herein, the term “casein kinase II phosphorylation site” includes an amino acid sequence of about 4 amino acid residues in length which includes a serine or threonine residue which is potentially phosphorylated by casein kinase II (CK-2). Preferably, a casein kinase II phosphorylation site has the consensus sequence [ST]-X(2)-[DE] [where S or T is the phosphorylation site and X is any amino acid]. Casein kinase II phosphorylation sites are described in, for example, Prosite PDOC00006 (http://www.expasy.ch/cgi-bin/nicedoc.p1?PDOC00006), the contents of which are incorporated herein by reference. Amino acid residues 4-7, 14-17, 54-57, 123-126, 264-267, 322-325, 375-378, 395-398, 559-562, 602-605, 618-621, 639-642, 703-706, 716-719, 745-748 and 764-767 of the IC23927 protein comprise casein kinase II phosphorylation sites. Accordingly, IC23927 proteins having at least one casein kinase II phosphorylation site are within the scope of the invention.

[0683] In another embodiment, an IC23927 molecule of the present invention is identified based on the presence of at least one tyrosine kinase phosphorylation site. As used herein, the term “tyrosine kinase phosphorylation site” includes an amino acid sequence of about 9 amino acid residues in length which includes a tyrosine residue which is potentially phosphorylated by a tyrosine kinase. Preferably, a tyrosine kinase phosphorylation site has the consensus sequence [RK]-x(2)-[DE]-x(3)-Y or [RK]-x(3)-[DE]-x(2)-Y [Y is the phosphorylation site]. Tyrosine kinase phosphorylation sites are described in, for example, Prosite PDOC00007 (http://www.expasy.ch/cgi-bin/nicedoc.p1?PDOC00007), the contents of which are incorporated herein by reference. Amino acid residues 617-625 of the IC23927 protein comprise tyrosine kinase phosphorylation sites. Accordingly, IC23927 proteins having at least one tyrosine kinase phosphorylation site are within the scope of the invention.

[0684] In another embodiment, an IC23927 molecule of the present invention is identified based on the presence of at least one N-myristoylation site. As used herein, the term “N-myristoylation site” includes an amino acid sequence of about 6 amino acid residues in length which includes an asparagine residue which is potentially acylated by the covalent addition of myristate. Preferably, a N-myristoylation site has the consensus sequence G-{EDRKHPFYW}-x(2)-[STAGCN]-{P} [G is the N-myristoylation site]. The N-terminal residue must be glycine. In position 2, uncharged residues are allowed. Charged residues, proline and large hydrophobic residues are not allowed. In positions 3 and 4, most, if not all, residues are allowed. In position 5, small uncharged residues are allowed (Ala, Ser, Thr, Cys, Asn and Gly). Serine is favored. In position 6, proline is not allowed. N-myristoylation sites are described in, for example, Prosite PDOC00008 (http://www.expasy.ch/cgi-bin/nicedoc.p1?PDOC00008), the contents of which are incorporated herein by reference. Amino acid residues 39-44, 217-222 and 468-473 of the IC23927 protein comprise N-myristoylation sites. Accordingly, IC23927 proteins having at least one N-myristoylation site are within the scope of the invention.

[0685] In another embodiment, an IC23927 molecule of the present invention is identified based on the presence of at least one amidation site. As used herein, the term “amidation site” includes an amino acid sequence of about 4 amino acid residues in length which includes a C-terminal residue which is potentially amidated. Preferably, an amidation site has the consensus sequence x-G-[RK]-[RK] [x is the amidation site]. Amidation sites are described in, for example, Prosite PDOC00009 (http://www.expasy.ch/cgi-bin/nicedoc.p1?PDOC00009), the contents of which are incorporated herein by reference. Amino acid residues 758-761 of the IC23927 protein comprise an amidation site. Accordingly, IC23927 proteins having at least one amidation site are within the scope of the invention.

[0686] In another embodiment, an IC23927 molecule of the present invention is identified based on the presence of an “ion transport protein domain” in the protein or corresponding nucleic acid molecule. As used herein, the term “ion transport protein domain” includes a protein domain having an amino acid sequence of about 200-300 amino acid residues and having a bit score for the alignment of the sequence to the ion transport protein domain Hidden Markov Model having Accession No. PF00520 of at about 25-100. Preferably, an ion transport protein domain includes at least about 225-275, or more preferably about 250 amino acid residues, and has a bit score for the alignment of the sequence to the ion transport protein domain Hidden Markov Model having Accession No. PF00520 of at least 25, 27, 30, 32, 35, 37, 38, 40, 42, 45, 50, 60, 70, 80, 90 or higher. To identify the presence of an ion transport protein domain in an IC23927 protein, and make the determination that a protein of interest has a particular profile, the amino acid sequence of the protein is searched against a database of known protein domains (e.g., the PFam database) using the default parameters (available at http://www.sanger.ac.uk/Software/Pfam/search.shtml). A search was performed against the PFam database resulting in the identification of an ion transport protein domain in the amino acid sequence of human IC23927 (SEQ ID NO:22) at about residues 437-686 of SEQ ID NO:22.

[0687] Isolated proteins of the present invention, preferably IC23927 proteins, have an amino acid sequence sufficiently identical to the amino acid sequence of SEQ ID NO:22 or are encoded by a nucleotide sequence sufficiently identical to SEQ ID NO:21 or 23. As used herein, the term “sufficiently identical” refers to a first amino acid or nucleotide sequence which contains a sufficient or minimum number of identical or equivalent (e.g., an amino acid residue which has a similar side chain) amino acid residues or nucleotides to a second amino acid or nucleotide sequence such that the first and second amino acid or nucleotide sequences share common structural domains or motifs and/or a common functional activity. For example, amino acid or nucleotide sequences which share common structural domains have at least 30%, 40%, or 50% homology, preferably 60% homology, more preferably 70%-80%, and even more preferably 90-95% homology across the amino acid sequences of the domains and contain at least one and preferably two structural domains or motifs, are defined herein as sufficiently identical. Furthermore, amino acid or nucleotide sequences which share at least 30%, 40%, or 50%, preferably 60%, more preferably 70-80%, or 90-95% homology and share a common functional activity are defined herein as sufficiently identical.

[0688] As used interchangeably herein, an “IC23927 activity”, “biological activity of IC23927” or “functional activity of IC23927”, refers to an activity exerted by an IC23927 protein, polypeptide or nucleic acid molecule in an IC23927 expressing cell or tissue in vivo or ex vivo, or in an reaction containing IC23927 protein, as determined in vitro, according to standard techniques. In one embodiment, an IC23927 activity is a direct activity, such a binding of an IC23927 target molecule to an IC23927 protein of the present invention or the transport of an IC23927 target molecule (e.g., across a cell membrane). As used herein, a “target molecule” is a molecule with which an IC23927 protein interacts in nature, such that IC23927-mediated function is achieved. An IC23927 target molecule can be a non-IC23927 molecule. In an exemplary embodiment, an IC23927 target molecule is an IC23927 ligand, e.g., an ionic ligand, for example, calcium, potassium or sodium. In a preferred embodiment, an IC23927 target molecule is calcium. In yet another embodiment, an IC23927 target molecule is GTP. Alternatively, an IC23927 activity is an indirect activity, such as a cellular signaling activity mediated by interaction of the IC23927 protein with an IC23927 ligand. The biological activities of IC23927 are described herein. For example, the IC23927 proteins of the present invention can have one or more of the following activities: (1) modulation of membrane excitability, (2) regulation of intracellular ion concentration, (3) modulation of membrane polarization (e.g., membrane polarization and/or depolarization), (4) regulation of action potential, (5) regulation of cellular signal transduction (e.g., regulation of neuronal signal transduction), (6) regulation of neurotransmitter release (e.g., from neuronal cells), (7) modulation of synaptic transmission, (8) regulation of neuronal excitability and/or plasticity, (9) regulation of muscle contraction, (10) regulation of cell activation (e.g., T cell activation), (11) regulation of cellular proliferation, growth, migration and/or differentiation, and/or (12) modulation of pain and/or pain signaling.

[0689] Accordingly, another embodiment of the invention features isolated IC23927 proteins and polypeptides having an IC23927 activity. Preferred proteins are IC23927 proteins having at least one transmembrane domain, and, preferably, an IC23927 activity. Other preferred proteins are IC23927 proteins having at least one ion transport protein domain and, preferably, an IC23927 activity. Yet other preferred proteins are IC23927 proteins having at least one site selected from the group consisting of an N-glycosylation site, a protein kinase C phosphorylation site, a casein kinase II phosphorylation site, a tyrosine kinase phosphorylation site, an N-myristoylation site and an amidation site and, preferably, an IC23927 activity. Yet other preferred proteins are IC23927 proteins having at least one transmembrane domain and/or an ion transport protein domain, at least at least one site selected from the group consisting of an N-glycosylation site, a protein kinase C phosphorylation site, a casein kinase II phosphorylation site, a tyrosine kinase phosphorylation site, an N-myristoylation site and an amidation site and, preferably, an IC23927 activity.

[0690] Additional preferred proteins have at least one transmembrane domain and/or an ion transport protein domain, at least at least one site selected from the group consisting of an N-glycosylation site, a protein kinase C phosphorylation site, a casein kinase II phosphorylation site, a tyrosine kinase phosphorylation site, an N-myristoylation site and an amidation site, and are, preferably, encoded by a nucleic acid molecule having a nucleotide sequence which hybridizes under stringent hybridization conditions to a nucleic acid molecule comprising the nucleotide sequence of SEQ ID NO:21 or 23.

[0691] The nucleotide sequence of the isolated human IC23927 cDNA and the predicted amino acid sequence of the human IC23927 polypeptide are shown in FIGS. 16A-G and in SEQ ID NOs:21 and 22, respectively. A plasmid containing the nucleotide sequence encoding human IC23927 was deposited with the American Type Culture Collection (ATCC), 10801 University Boulevard, Manassas, Va. 20110-2209, USA, on ______ and assigned Accession Number ______. This deposit will be maintained under the terms of the Budapest Treaty on the International Recognition of the Deposit of Microorganisms for the Purposes of Patent Procedure. This deposit was made merely as a convenience for those of skill in the art and is not an admission that a deposit is required under 35 U.S.C. §112.

[0692] The human IC23927 gene, which is approximately 5269 nucleotides in length, encodes a protein having a molecular weight of approximately 94 kD and which is approximately 816 amino acid residues in length.

[0693] Various aspects of the invention are described in further detail in the following subsections:

[0694] I. Isolated Nucleic Acid Molecules

[0695] One aspect of the invention pertains to isolated nucleic acid molecules that encode IC23927 proteins or biologically active portions thereof, as well as nucleic acid fragments sufficient for use as hybridization probes to identify IC23927-encoding nucleic acid molecules (e.g., IC23927 mRNA) and fragments for use as PCR primers for the amplification or mutation of IC23927 nucleic acid molecules. As used herein, the term “nucleic acid molecule” is intended to include DNA molecules (e.g., cDNA or genomic DNA) and RNA molecules (e.g, mRNA) and analogs of the DNA or RNA generated using nucleotide analogs. The nucleic acid molecule can be single-stranded or double-stranded, but preferably is double-stranded DNA.

[0696] The term “isolated nucleic acid molecule” includes nucleic acid molecules which are separated from other nucleic acid molecules which are present in the natural source of the nucleic acid. For example, with regards to genomic DNA, the term “isolated” includes nucleic acid molecules which are separated from the chromosome with which the genomic DNA is naturally associated. Preferably, an “isolated” nucleic acid is free of sequences which naturally flank the nucleic acid (i.e., sequences located at the 5′ and 3′ ends of the nucleic acid) in the genomic DNA of the organism from which the nucleic acid is derived. For example, in various embodiments, the isolated IC23927 nucleic acid molecule can contain less than about 5 kb, 4 kb, 3 kb, 2 kb, 1 kb, 0.5 kb or 0.1 kb of nucleotide sequences which naturally flank the nucleic acid molecule in genomic DNA of the cell from which the nucleic acid is derived. Moreover, an “isolated” nucleic acid molecule, such as a cDNA molecule, can be substantially free of other cellular material, or culture medium when produced by recombinant techniques, or substantially free of chemical precursors or other chemicals when chemically synthesized.

[0697] A nucleic acid molecule of the present invention, e.g., a nucleic acid molecule having the nucleotide sequence of SEQ ID NO:21 or 23, or the nucleotide sequence of the DNA insert of the plasmid deposited with ATCC as Accession Number ______, or a portion thereof, can be isolated using standard molecular biology techniques and the sequence information provided herein. Using all or a portion of the nucleic acid sequence of SEQ ID NO:21 or 23, or the nucleotide sequence of the DNA insert of the plasmid deposited with ATCC as Accession Number ______, as a hybridization probe, IC23927 nucleic acid molecules can be isolated using standard hybridization and cloning techniques (e.g., as described in Sambrook, J., Fritsh, E. F., and Maniatis, T. Molecular Cloning: A Laboratory Manual. 2nd, ed., Cold Spring Harbor Laboratory, Cold Spring Harbor Laboratory Press, Cold Spring Harbor, N.Y., 1989).

[0698] Moreover, a nucleic acid molecule encompassing all or a portion of SEQ ID NO:21 or 23, or the nucleotide sequence of the DNA insert of the plasmid deposited with ATCC as Accession Number ______ can be isolated by the polymerase chain reaction (PCR) using synthetic oligonucleotide primers designed based upon the sequence of SEQ ID NO:21 or 23, or the nucleotide sequence of the DNA insert of the plasmid deposited with ATCC as Accession Number ______.

[0699] A nucleic acid of the invention can be amplified using cDNA, mRNA or alternatively, genomic DNA, as a template and appropriate oligonucleotide primers according to standard PCR amplification techniques. The nucleic acid so amplified can be cloned into an appropriate vector and characterized by DNA sequence analysis. Furthermore, oligonucleotides corresponding to IC23927 nucleotide sequences can be prepared by standard synthetic techniques, e.g., using an automated DNA synthesizer.

[0700] In a preferred embodiment, an isolated nucleic acid molecule of the invention comprises the nucleotide sequence shown in SEQ ID NO:21. The sequence of SEQ ID NO:21 corresponds to the human IC23927 cDNA. This cDNA comprises sequences encoding the human IC23927 protein (i.e., “the coding region”, from nucleotides 288-2738), as well as 5′ untranslated sequences (nucleotides 1-287) and 3′ untranslated sequences (nucleotides 2399-5269). Alternatively, the nucleic acid molecule can comprise only the coding region of SEQ ID NO:21 (e.g., nucleotides 288-2738, corresponding to SEQ ID NO:23).

[0701] In another preferred embodiment, an isolated nucleic acid molecule of the invention comprises a nucleic acid molecule which is a complement of the nucleotide sequence shown in SEQ ID NO:21 or 23, or the nucleotide sequence of the DNA insert of the plasmid deposited with ATCC as Accession Number ______, or a portion of any of these nucleotide sequences. A nucleic acid molecule which is complementary to the nucleotide sequence shown in SEQ ID NO:21 or 23, or the nucleotide sequence of the DNA insert of the plasmid deposited with ATCC as Accession Number ______, is one which is sufficiently complementary to the nucleotide sequence shown in SEQ ID NO:21 or 23, or the nucleotide sequence of the DNA insert of the plasmid deposited with ATCC as Accession Number ______, such that it can hybridize to the nucleotide sequence shown in SEQ ID NO:21 or 23, or the nucleotide sequence of the DNA insert of the plasmid deposited with ATCC as Accession Number ______, thereby forming a stable duplex.

[0702] In still another preferred embodiment, an isolated nucleic acid molecule of the present invention comprises a nucleotide sequence which is at least about 50%, 55%, 60%, 65%, 70%, 75%, 80%, 85%, 90%, 95%, 96%, 97%, 98%, 99% or more identical to the entire length of the nucleotide sequence shown in SEQ ID NO:21 or 23, or the entire length of the nucleotide sequence of the DNA insert of the plasmid deposited with ATCC as Accession Number ______, or a portion of any of these nucleotide sequences.

[0703] Moreover, the nucleic acid molecule of the invention can comprise only a portion of the nucleic acid sequence of SEQ ID NO:21 or 23, or the nucleotide sequence of the DNA insert of the plasmid deposited with ATCC as Accession Number ______, for example, a fragment which can be used as a probe or primer or a fragment encoding a portion of an IC23927 protein, e.g., a biologically active portion of an IC23927 protein. The nucleotide sequence determined from the cloning of the IC23927 gene allows for the generation of probes and primers designed for use in identifying and/or cloning other IC23927 family members, as well as IC23927 homologues from other species. The probe/primer typically comprises substantially purified oligonucleotide. The oligonucleotide typically comprises a region of nucleotide sequence that hybridizes under stringent conditions to at least about 12 or 15, preferably about 20 or 25, more preferably about 30, 35, 40, 45, 50, 55, 60, 65, 75, 80, 85, 90, 95, or 100 or more consecutive nucleotides of a sense sequence of SEQ ID NO:21 or 23, or the nucleotide sequence of the DNA insert of the plasmid deposited with ATCC as Accession Number ______, of an anti-sense sequence of SEQ ID NO:21 or 23, or the nucleotide sequence of the DNA insert of the plasmid deposited with ATCC as Accession Number ______, or of a naturally occurring allelic variant or mutant of SEQ ID NO:21 or 23, or the nucleotide sequence of the DNA insert of the plasmid deposited with ATCC as Accession Number ______. In one embodiment, a nucleic acid molecule of the present invention comprises a nucleotide sequence which is at least about (and in some embodiment, less than or greater than) 500-600, 600-700, 700-800, 800-900, 900-1000, 1000-1100, 1100-1200, 1200-1300, 1300-1400, 1400-1500, 1500-1600, 1600-1700, 1700-1800, 1800-1900, 1900-2000, 2000-2100, 2200-2300, 2300-2400, 2400-2500 or more nucleotides in length and hybridizes under stringent hybridization conditions to a nucleic acid molecule of SEQ ID NO:21 or 23, or the nucleotide sequence of the DNA insert of the plasmid deposited with ATCC as Accession Number ______.

[0704] Probes based on the IC23927 nucleotide sequences can be used to detect transcripts or genomic sequences encoding the same or homologous proteins. In preferred embodiments, the probe further comprises a label group attached thereto, e.g., the label group can be a radioisotope, a fluorescent compound, an enzyme, or an enzyme co-factor. Such probes can be used as a part of a diagnostic test kit for identifying cells or tissue which misexpress an IC23927 protein, such as by measuring a level of an IC23927-encoding nucleic acid in a sample of cells from a subject e.g., detecting IC23927 mRNA levels or determining whether a genomic IC23927 gene has been mutated or deleted.

[0705] A nucleic acid fragment encoding a “biologically active portion of an IC23927 protein” can be prepared by isolating a portion of the nucleotide sequence of SEQ ID NO:21 or 23, or the nucleotide sequence of the DNA insert of the plasmid deposited with ATCC as Accession Number ______, which encodes a polypeptide having an IC23927 biological activity (the biological activities of the IC23927 proteins are described herein), expressing the encoded portion of the IC23927 protein (e.g., by recombinant expression in vitro) and assessing the activity of the encoded portion of the IC23927 protein.

[0706] The invention further encompasses nucleic acid molecules that differ from the nucleotide sequence shown in SEQ ID NO:21 or 23, or the nucleotide sequence of the DNA insert of the plasmid deposited with ATCC as Accession Number ______, due to degeneracy of the genetic code and thus encode the same IC23927 proteins as those encoded by the nucleotide sequence shown in SEQ ID NO:21 or 23, or the nucleotide sequence of the DNA insert of the plasmid deposited with ATCC as Accession Number ______. In another embodiment, an isolated nucleic acid molecule of the invention has a nucleotide sequence encoding a protein having an amino acid sequence shown in SEQ ID NO:22.

[0707] In addition to the IC23927 nucleotide sequences shown in SEQ ID NO:21 or 23, or the nucleotide sequence of the DNA insert of the plasmid deposited with ATCC as Accession Number ______, it will be appreciated by those skilled in the art that DNA sequence polymorphisms that lead to changes in the amino acid sequences of the IC23927 proteins may exist within a population (e.g., the human population). Such genetic polymorphism in the IC23927 genes may exist among individuals within a population due to natural allelic variation. As used herein, the terms “gene” and “recombinant gene” refer to nucleic acid molecules which include an open reading frame encoding an IC23927 protein, preferably a mammalian IC23927 protein, and can further include non-coding regulatory sequences, and introns.

[0708] Allelic variants of human IC23927 include both functional and non-functional IC23927 proteins. Functional allelic variants are naturally occurring amino acid sequence variants of the human IC23927 protein that maintain the ability to bind an IC23927 ligand or transport such ligand and/or modulate membrane excitability or signal transduction. Functional allelic variants will typically contain only conservative substitution of one or more amino acids of SEQ ID NO:22, or substitution, deletion or insertion of non-critical residues in non-critical regions of the protein.

[0709] Non-functional allelic variants are naturally occurring amino acid sequence variants of the human IC23927 protein that do not have the ability to form functional calcium channels or to modulate membrane excitability. Non-functional allelic variants will typically contain a non-conservative substitution, a deletion, or insertion or premature truncation of the amino acid sequence of SEQ ID NO:22, or a substitution, insertion or deletion in critical residues or critical regions.

[0710] The present invention further provides non-human orthologues of the human IC23927 proteins. Orthologues of the human IC23927 protein are proteins that are isolated from non-non-human organisms and possess the same IC23927 ligand binding and/or modulation of membrane excitation mechanisms of the human IC23927 protein. Orthologues of the human IC23927 protein can readily be identified as comprising an amino acid sequence that is substantially identical to SEQ ID NO:22.

[0711] Moreover, nucleic acid molecules encoding other IC23927 family members and, thus, which have a nucleotide sequence which differs from the IC23927 sequences of SEQ ID NO:21 or 23, or the nucleotide sequence of the DNA insert of the plasmid deposited with ATCC as Accession Number ______ are intended to be within the scope of the invention. For example, another IC23927 cDNA can be identified based on the nucleotide sequence of human IC23927. Moreover, nucleic acid molecules encoding IC23927 proteins from different species, and which, thus, have a nucleotide sequence which differs from the IC23927 sequences of SEQ ID NO:21 or 23, or the nucleotide sequence of the DNA insert of the plasmid deposited with ATCC as Accession Number ______ are intended to be within the scope of the invention. For example, a mouse IC23927 cDNA can be identified based on the nucleotide sequence of a human IC23927.

[0712] Nucleic acid molecules corresponding to natural allelic variants and homologues of the IC23927 cDNAs of the invention can be isolated based on their homology to the IC23927 nucleic acids disclosed herein using the cDNAs disclosed herein, or a portion thereof, as a hybridization probe according to standard hybridization techniques under stringent hybridization conditions. Nucleic acid molecules corresponding to natural allelic variants and homologues of the IC23927 cDNAs of the invention can further be isolated by mapping to the same chromosome or locus as the IC23927 gene.

[0713] Accordingly, in another embodiment, an isolated nucleic acid molecule of the invention is at least 15, 20, 25, 30 or more nucleotides in length and hybridizes under stringent conditions to the nucleic acid molecule comprising the nucleotide sequence of SEQ ID NO:21 or 23, or the nucleotide sequence of the DNA insert of the plasmid deposited with ATCC as Accession Number ______. In other embodiment, the nucleic acid is at least 500-600, 600-700, 700-800, 800-900, 900-1000, 1000-1100, 1100-1200, 1200-1300, 1300-1400, 1400-1500, 1500-1600, 1600-1700, 1700-1800, 1800-1900, 1900-2000, 2000-2100, 2200-2300, 2300-2400, 2400-2500, or more nucleotides in length. As used herein, the term “hybridizes under stringent conditions” is intended to describe conditions for hybridization and washing under which nucleotide sequences at least 60% identical to each other typically remain hybridized to each other. Preferably, the conditions are such that sequences at least about 70%, more preferably at least about 80%, even more preferably at least about 85% or 90% identical to each other typically remain hybridized to each other. Such stringent conditions are known to those skilled in the art and can be found in Current Protocols in Molecular Biology, John Wiley & Sons, N.Y. (1989), 6.3.1-6.3.6. A preferred, non-limiting example of stringent hybridization conditions are hybridization in 6×sodium chloride/sodium citrate (SSC) at about 45° C., followed by one or more washes in 0.2×SSC, 0.1% SDS at 50° C., preferably at 55° C., more preferably at 60° C., and even more preferably at 65° C. Preferably, an isolated nucleic acid molecule of the invention that hybridizes under stringent conditions to the sequence of SEQ ID NO:21 or 23 and corresponds to a naturally-occurring nucleic acid molecule. As used herein, a “naturally-occurring” nucleic acid molecule refers to an RNA or DNA molecule having a nucleotide sequence that occurs in nature (e.g., encodes a natural protein).

[0714] In addition to naturally-occurring allelic variants of the IC23927 sequences that may exist in the population, the skilled artisan will further appreciate that changes can be introduced by mutation into the nucleotide sequences of SEQ ID NO:21 or 23, or the nucleotide sequence of the DNA insert of the plasmid deposited with ATCC as Accession Number ______, thereby leading to changes in the amino acid sequence of the encoded IC23927 proteins, without altering the functional ability of the IC23927 proteins. For example, nucleotide substitutions leading to amino acid substitutions at “non-essential” amino acid residues can be made in the sequence of SEQ ID NO:21 or 23, or the nucleotide sequence of the DNA insert of the plasmid deposited with ATCC as Accession Number ______. A “non-essential” amino acid residue is a residue that can be altered from the wild-type sequence of IC23927 (e.g., the sequence of SEQ ID NO:22) without altering the biological activity, whereas an “essential” amino acid residue is required for biological activity. For example, amino acid residues that are conserved among the IC23927 proteins of the present invention, e.g., those present in a transmembrane domain, are predicted to be particularly unamenable to alteration. Furthermore, additional amino acid residues that are conserved between the IC23927 proteins of the present invention and other members of the IC23927 family are not likely to be amenable to alteration.

[0715] Accordingly, another aspect of the invention pertains to nucleic acid molecules encoding IC23927 proteins that contain changes in amino acid residues that are not essential for activity. Such IC23927 proteins differ in amino acid sequence from SEQ ID NO:22, yet retain biological activity. In one embodiment, the isolated nucleic acid molecule comprises a nucleotide sequence encoding a protein, wherein the protein comprises an amino acid sequence at least about 50%, 55%, 60%, 65%, 70%, 75%, 80%, 85%, 90%, 95%, 96%, 97%, 98%, 99% or more identical to SEQ ID NO:22.

[0716] An isolated nucleic acid molecule encoding an IC23927 protein identical to the protein of SEQ ID NO:22, can be created by introducing one or more nucleotide substitutions, additions or deletions into the nucleotide sequence of SEQ ID NO:21 or 23, or the nucleotide sequence of the DNA insert of the plasmid deposited with ATCC as Accession Number ______, such that one or more amino acid substitutions, additions or deletions are introduced into the encoded protein. Mutations can be introduced into SEQ ID NO:21 or 23, or the nucleotide sequence of the DNA insert of the plasmid deposited with ATCC as Accession Number ______ by standard techniques, such as site-directed mutagenesis and PCR-mediated mutagenesis. Preferably, conservative amino acid substitutions are made at one or more predicted non-essential amino acid residues. A “conservative amino acid substitution” is one in which the amino acid residue is replaced with an amino acid residue having a similar side chain. Families of amino acid residues having similar side chains have been defined in the art. These families include amino acids with basic side chains (e.g., lysine, arginine, histidine), acidic side chains (e.g, aspartic acid, glutamic acid), uncharged polar side chains (e.g., glycine, asparagine, glutamine, serine, threonine, tyrosine, cysteine), nonpolar side chains (e.g., alanine, valine, leucine, isoleucine, proline, phenylalanine, methionine, tryptophan), beta-branched side chains (e.g., threonine, valine, isoleucine) and aromatic side chains (e.g., tyrosine, phenylalanine, tryptophan, histidine). Thus, a predicted nonessential amino acid residue in an IC23927 protein is preferably replaced with another amino acid residue from the same side chain family. Alternatively, in another embodiment, mutations can be introduced randomly along all or part of an IC23927 coding sequence, such as by saturation mutagenesis, and the resultant mutants can be screened for IC23927 biological activity to identify mutants that retain activity. Following mutagenesis of SEQ ID NO:21 or 23, or the nucleotide sequence of the DNA insert of the plasmid deposited with ATCC as Accession Number ______, the encoded protein can be expressed recombinantly and the activity of the protein can be determined.

[0717] In a preferred embodiment, a mutant IC23927 protein can be assayed for the ability to (1) modulate membrane excitability, (2) regulate intracellular ion concentration, (3) modulate membrane polarization (e.g., membrane polarization and/or depolarization), (4) regulate action potential, (5) regulate cellular signal transduction, (6) regulate neurotransmitter release (e.g., from neuronal cells), (7) modulate synaptic transmission, (8) regulate neuronal excitability and/or plasticity, (9) regulate muscle contraction, (10) regulate cell activation (e.g., T cell activation) and (11) regulate cellular proliferation, growth, migration and/or differentiation.

[0718] In addition to the nucleic acid molecules encoding IC23927 proteins described above, another aspect of the invention pertains to isolated nucleic acid molecules which are antisense thereto. An “antisense” nucleic acid comprises a nucleotide sequence which is complementary to a “sense” nucleic acid encoding a protein, e.g., complementary to the coding strand of a double-stranded cDNA molecule or complementary to an mRNA sequence. Accordingly, an antisense nucleic acid can hydrogen bond to a sense nucleic acid. The antisense nucleic acid can be complementary to an entire IC23927 coding strand, or to only a portion thereof. In one embodiment, an antisense nucleic acid molecule is antisense to a “coding region” of the coding strand of a nucleotide sequence encoding IC23927. The term “coding region” refers to the region of the nucleotide sequence comprising codons which are translated into amino acid residues (e.g., the coding region of human IC23927 corresponds to SEQ ID NO:23). In another embodiment, the antisense nucleic acid molecule is antisense to a “noncoding region” of the coding strand of a nucleotide sequence encoding IC23927. The term “noncoding region” refers to 5′ and 3′ sequences which flank the coding region that are not translated into amino acids (i.e., also referred to as 5′ and 3′ untranslated regions).

[0719] Given the coding strand sequences encoding IC23927 disclosed herein (e.g., SEQ ID NO:23), antisense nucleic acids of the invention can be designed according to the rules of Watson and Crick base pairing. The antisense nucleic acid molecule can be complementary to the entire coding region of IC23927 mRNA, but more preferably is an oligonucleotide which is antisense to only a portion of the coding or noncoding region of IC23927 mRNA. For example, the antisense oligonucleotide can be complementary to the region surrounding the translation start site of IC23927 mRNA. An antisense oligonucleotide can be, for example, about 5, 10, 15, 20, 25, 30, 35, 40, 45 or 50 nucleotides in length. An antisense nucleic acid of the invention can be constructed using chemical synthesis and enzymatic ligation reactions using procedures known in the art. For example, an antisense nucleic acid (e.g., an antisense oligonucleotide) can be chemically synthesized using naturally occurring nucleotides or variously modified nucleotides designed to increase the biological stability of the molecules or to increase the physical stability of the duplex formed between the antisense and sense nucleic acids, e.g., phosphorothioate derivatives and acridine substituted nucleotides can be used. Examples of modified nucleotides which can be used to generate the antisense nucleic acid include 5-fluorouracil, 5-bromouracil, 5-chlorouracil, 5-iodouracil, hypoxanthine, xantine, 4-acetylcytosine, 5-(carboxyhydroxylmethyl) uracil, 5-carboxymethylaminomethyl-2-thiouridine, 5-carboxymethylaminomethyluracil, dihydrouracil, beta-D-galactosylqueosine, inosine, N6-isopentenyladenine, 1-methylguanine, 1-methylinosine, 2,2-dimethylguanine, 2-methyladenine, 2-methylguanine, 3-methylcytosine, 5-methylcytosine, N6-adenine, 7-methylguanine, 5-methylaminomethyluracil, 5-methoxyaminomethyl-2-thiouracil, beta-D-mannosylqueosine, 5′-methoxycarboxymethyluracil, 5-methoxyuracil, 2-methylthio-N6-isopentenyladenine, uracil-5-oxyacetic acid (v), wybutoxosine, pseudouracil, queosine, 2-thiocytosine, 5-methyl-2-thiouracil, 2-thiouracil, 4-thiouracil, 5-methyluracil, uracil-5-oxyacetic acid methylester, uracil-5-oxyacetic acid (v), 5-methyl-2-thiouracil, 3-(3-amino-3-N-2-carboxypropyl) uracil, (acp3)w, and 2,6-diaminopurine. Alternatively, the antisense nucleic acid can be produced biologically using an expression vector into which a nucleic acid has been subcloned in an antisense orientation (i.e., RNA transcribed from the inserted nucleic acid will be of an antisense orientation to a target nucleic acid of interest, described further in the following subsection).

[0720] The antisense nucleic acid molecules of the invention are typically administered to a subject or generated in situ such that they hybridize with or bind to cellular mRNA and/or genomic DNA encoding an IC23927 protein to thereby inhibit expression of the protein, e.g., by inhibiting transcription and/or translation. The hybridization can be by conventional nucleotide complementarity to form a stable duplex, or, for example, in the case of an antisense nucleic acid molecule which binds to DNA duplexes, through specific interactions in the major groove of the double helix. An example of a route of administration of antisense nucleic acid molecules of the invention include direct injection at a tissue site. Alternatively, antisense nucleic acid molecules can be modified to target selected cells and then administered systemically. For example, for systemic administration, antisense molecules can be modified such that they specifically bind to receptors or antigens expressed on a selected cell surface, e.g., by linking the antisense nucleic acid molecules to peptides or antibodies which bind to cell surface receptors or antigens. The antisense nucleic acid molecules can also be delivered to cells using the vectors described herein. To achieve sufficient intracellular concentrations of the antisense molecules, vector constructs in which the antisense nucleic acid molecule is placed under the control of a strong pol II or pol III promoter are preferred.

[0721] In yet another embodiment, the antisense nucleic acid molecule of the invention is an α-anomeric nucleic acid molecule. An α-anomeric nucleic acid molecule forms specific double-stranded hybrids with complementary RNA in which, contrary to the usual β-units, the strands run parallel to each other (Gaultier et al. (1987) Nucleic Acids. Res. 15:6625-6641). The antisense nucleic acid molecule can also comprise a 2′-o-methylribonucleotide (Inoue et al. (1987) Nucleic Acids Res. 15:6131-6148) or a chimeric RNA-DNA analogue (Inoue et al. (1987) FEBS Lett. 215:327-330).

[0722] In still another embodiment, an antisense nucleic acid of the invention is a ribozyme. Ribozymes are catalytic RNA molecules with ribonuclease activity which are capable of cleaving a single-stranded nucleic acid, such as an mRNA, to which they have a complementary region. Thus, ribozymes (e.g., hammerhead ribozymes (described in Haseloff and Gerlach (1988) Nature 334:585-591)) can be used to catalytically cleave IC23927 mRNA transcripts to thereby inhibit translation of IC23927 mRNA. A ribozyme having specificity for an IC23927-encoding nucleic acid can be designed based upon the nucleotide sequence of an IC23927 cDNA disclosed herein (i.e., SEQ ID NO:21 or 23, or the nucleotide sequence of the DNA insert of the plasmid deposited with ATCC as Accession Number ______). For example, a derivative of a Tetrahymena L-19 IVS RNA can be constructed in which the nucleotide sequence of the active site is complementary to the nucleotide sequence to be cleaved in an IC23927-encoding mRNA. See, e.g., Cech et al. U.S. Pat. No. 4,987,071; and Cech et al. U.S. Pat. No. 5,116,742. Alternatively, IC23927 mRNA can be used to select a catalytic RNA having a specific ribonuclease activity from a pool of RNA molecules. See, e.g., Bartel, D. and Szostak, J. W. (1993) Science 261:1411-1418.

[0723] Alternatively, IC23927 gene expression can be inhibited by targeting nucleotide sequences complementary to the regulatory region of the IC23927 (e.g., the IC23927 promoter and/or enhancers; e.g., nucleotides 1-287 of SEQ ID NO:21) to form triple helical structures that prevent transcription of the IC23927 gene in target cells. See generally, Helene, C. (1991) Anticancer Drug Des. 6(6):569-84; Helene, C. et al. (1992) Ann. N.Y. Acad. Sci. 660:27-36; and Maher, L. J. (1992) Bioassays 14(12):807-15.

[0724] In yet another embodiment, the IC23927 nucleic acid molecules of the present invention can be modified at the base moiety, sugar moiety or phosphate backbone to improve, e.g., the stability, hybridization, or solubility of the molecule. For example, the deoxyribose phosphate backbone of the nucleic acid molecules can be modified to generate peptide nucleic acids (see Hyrup B. et al. (1996) Bioorganic & Medicinal Chemistry 4 (1): 5-23). As used herein, the terms “peptide nucleic acids” or “PNAs” refer to nucleic acid mimics, e.g, DNA mimics, in which the deoxyribose phosphate backbone is replaced by a pseudopeptide backbone and only the four natural nucleobases are retained. The neutral backbone of PNAs has been shown to allow for specific hybridization to DNA and RNA under conditions of low ionic strength. The synthesis of PNA oligomers can be performed using standard solid phase peptide synthesis protocols as described in Hyrup B. et al. (1996) supra; Perry-O'Keefe et al. Proc. Natl. Acad. Sci. 93: 14670-675.

[0725] PNAs of IC23927 nucleic acid molecules can be used in therapeutic and diagnostic applications. For example, PNAs can be used as antisense or antigene agents for sequence-specific modulation of gene expression by, for example, inducing transcription or translation arrest or inhibiting replication. PNAs of IC23927 nucleic acid molecules can also be used in the analysis of single base pair mutations in a gene, (e.g., by PNA-directed PCR clamping); as ‘artificial restriction enzymes’ when used in combination with other enzymes, (e.g., S1 nucleases (Hyrup B. (1996) supra)); or as probes or primers for DNA sequencing or hybridization (Hyrup B. et al. (1996) supra; Perry-O'Keefe supra).

[0726] In another embodiment, PNAs of IC23927 can be modified, (e.g., to enhance their stability or cellular uptake), by attaching lipophilic or other helper groups to PNA, by the formation of PNA-DNA chimeras, or by the use of liposomes or other techniques of drug delivery known in the art. For example, PNA-DNA chimeras of IC23927 nucleic acid molecules can be generated which may combine the advantageous properties of PNA and DNA. Such chimeras allow DNA recognition enzymes, (e.g., RNAse H and DNA polymerases), to interact with the DNA portion while the PNA portion would provide high binding affinity and specificity. PNA-DNA chimeras can be linked using linkers of appropriate lengths selected in terms of base stacking, number of bonds between the nucleobases, and orientation (Hyrup B. (1996) supra). The synthesis of PNA-DNA chimeras can be performed as described in Hyrup B. (1996) supra and Finn P. J. et al. (1996) Nucleic Acids Res. 24 (17): 3357-63. For example, a DNA chain can be synthesized on a solid support using standard phosphoramidite coupling chemistry and modified nucleoside analogs, e.g., 5′-(4-methoxytrityl)amino-5′-deoxy-thymidine phosphoramidite, can be used as a between the PNA and the 5′ end of DNA (Mag, M. et al. (1989) Nucleic Acid Res. 17: 5973-88). PNA monomers are then coupled in a stepwise manner to produce a chimeric molecule with a 5′ PNA segment and a 3′ DNA segment (Finn P. J. et al. (1996) supra). Alternatively, chimeric molecules can be synthesized with a 5′ DNA segment and a 3′ PNA segment (Peterser, K. H. et al. (1975) Bioorganic Med. Chem. Lett. 5: 1119-11124).

[0727] In other embodiments, the oligonucleotide may include other appended groups such as peptides (e.g., for targeting host cell receptors in vivo), or agents facilitating transport across the cell membrane (see, e.g., Letsinger et al. (1989) Proc. Natl. Acad. Sci. USA 86:6553-6556; Lemaitre et al. (1987) Proc. Natl. Acad. Sci. USA 84:648-652; PCT Publication No. W088/09810) or the blood-brain barrier (see, e.g., PCT Publication No. W089/10134). In addition, oligonucleotides can be modified with hybridization-triggered cleavage agents (See, e.g., Krol et al. (1988) Bio-Techniques 6:958-976) or intercalating agents. (See, e.g., Zon (1988) Pharm. Res. 5:539-549). To this end, the oligonucleotide may be conjugated to another molecule, (e.g., a peptide, hybridization triggered cross-linking agent, transport agent, or hybridization-triggered cleavage agent).

[0728] Alternatively, the expression characteristics of an endogenous IC23927 gene within a cell line or microorganism may be modified by inserting a heterologous DNA regulatory element into the genome of a stable cell line or cloned microorganism such that the inserted regulatory element is operatively linked with the endogenous IC23927 gene. For example, an endogenous IC23927 gene which is normally “transcriptionally silent”, i.e., an IC23927 gene which is normally not expressed, or is expressed only at very low levels in a cell line or microorganism, may be activated by inserting a regulatory element which is capable of promoting the expression of a normally expressed gene product in that cell line or microorganism. Alternatively, a transcriptionally silent, endogenous IC23927 gene may be activated by insertion of a promiscuous regulatory element that works across cell types.

[0729] A heterologous regulatory element may be inserted into a stable cell line or cloned microorganism, such that it is operatively linked with an endogenous IC23927 gene, using techniques, such as targeted homologous recombination, which are well known to those of skill in the art, and described, e.g., in Chappel, U.S. Pat. No. 5,272,071; PCT publication No. WO 91/06667, published May 16, 1991.

[0730] II. Isolated IC23927 Proteins and Anti-IC23927 Antibodies

[0731] One aspect of the invention pertains to isolated IC23927 proteins, and biologically active portions thereof, as well as polypeptide fragments suitable for use as immunogens to raise anti-IC23927 antibodies. In one embodiment, native IC23927 proteins can be isolated from cells or tissue sources by an appropriate purification scheme using standard protein purification techniques. In another embodiment, IC23927 proteins are produced by recombinant DNA techniques. Alternative to recombinant expression, an IC23927 protein or polypeptide can be synthesized chemically using standard peptide synthesis techniques.

[0732] An “isolated” or “purified” protein or biologically active portion thereof is substantially free of cellular material or other contaminating proteins from the cell or tissue source from which the IC23927 protein is derived, or substantially free from chemical precursors or other chemicals when chemically synthesized. The language “substantially free of cellular material” includes preparations of IC23927 protein in which the protein is separated from cellular components of the cells from which it is isolated or recombinantly produced. In one embodiment, the language “substantially free of cellular material” includes preparations of IC23927 protein having less than about 30% (by dry weight) of non-IC23927 protein (also referred to herein as a “contaminating protein”), more preferably less than about 20% of non-IC23927 protein, still more preferably less than about 10% of non-IC23927 protein, and most preferably less than about 5% non-IC23927 protein. When the IC23927 protein or biologically active portion thereof is recombinantly produced, it is also preferably substantially free of culture medium, i e., culture medium represents less than about 20%, more preferably less than about 10%, and most preferably less than about 5% of the volume of the protein preparation.

[0733] The language “substantially free of chemical precursors or other chemicals” includes preparations of IC23927 protein in which the protein is separated from chemical precursors or other chemicals which are involved in the synthesis of the protein. In one embodiment, the language “substantially free of chemical precursors or other chemicals” includes preparations of IC23927 protein having less than about 30% (by dry weight) of chemical precursors or non-IC23927 chemicals, more preferably less than about 20% chemical precursors or non-IC23927 chemicals, still more preferably less than about 10% chemical precursors or non-IC23927 chemicals, and most preferably less than about 5% chemical precursors or non-IC23927 chemicals.

[0734] As used herein, a “biologically active portion” of an IC23927 protein includes a fragment of an IC23927 protein which participates in an interaction between an IC23927 molecule and a non-IC23927 molecule. Biologically active portions of an IC23927 protein include peptides comprising amino acid sequences sufficiently identical to or derived from the amino acid sequence of the IC23927 protein, e.g., the amino acid sequence shown in SEQ ID NO:22, which include less amino acids than the full length IC23927 proteins, and exhibit at least one activity of an IC23927 protein. Typically, biologically active portions comprise a domain or motif with at least one activity of the IC23927 protein, e.g., modulating membrane excitation mechanisms. A biologically active portion of an IC23927 protein can be a polypeptide which is, for example, 25, 30, 35, 40, 45, 50, 75, 100, 125, 150, 175, 200, 225, 250, 275, 300, 316, 325, 350, 375, 400, 425, 450, 274, 500, 525, 550, 575, 600, 625, 650, 675, 700, 725, 750, 775, 800, or more amino acids in length. Biologically active portions of an IC23927 protein can be used as targets for developing agents which modulate an IC23927 mediated activity, e.g., a membrane excitation mechanism.

[0735] In one embodiment, a biologically active portion of an IC23927 protein comprises at least one transmembrane domain and/or an ion transport protein domain. It is to be understood that a preferred biologically active portion of an IC23927 protein of the present invention comprises at least one transmembrane domain and/or an ion transport protein and at least one site selected from the group consisting of an N-glycosylation site, a protein kinase C phosphorylation site, a casein kinase II phosphorylation site, a tyrosine kinase phosphorylation site, an N-myristoylation site and an amidation site. Moreover, other biologically active portions, in which other regions of the protein are deleted, can be prepared by recombinant techniques and evaluated for one or more of the functional activities of a native IC23927 protein.

[0736] In a preferred embodiment, the IC23927 protein has an amino acid sequence shown in SEQ ID NO:22. In other embodiments, the IC23927 protein is substantially identical to SEQ ID NO:22, and retains the functional activity of the protein of SEQ ID NO:22, yet differs in amino acid sequence due to natural allelic variation or mutagenesis, as described in detail in subsection I above. Accordingly, in another embodiment, the IC23927 protein is a protein which comprises an amino acid sequence at least about 50%, 55%, 60%, 65%, 70%, 75%, 80%, 85%, 90%, 95%, 96%, 97%, 98%, 99% or more identical to SEQ ID NO:22.

[0737] To determine the percent identity of two amino acid sequences or of two nucleic acid sequences, the sequences are aligned for optimal comparison purposes (e.g., gaps can be introduced in one or both of a first and a second amino acid or nucleic acid sequence for optimal alignment and non-identical sequences can be disregarded for comparison purposes). In a preferred embodiment, the length of a reference sequence aligned for comparison purposes is at least 30%, preferably at least 40%, more preferably at least 50%, even more preferably at least 60%, and even more preferably at least 70%, 80%, or 90% of the length of the reference sequence (e.g., when aligning a second sequence to the IC23927 amino acid sequence of SEQ ID NO:22 having 816 amino acid residues, at least 245, 326, 407, 490, 571, 653 or 734 or more amino acid residues are aligned). The amino acid residues or nucleotides at corresponding amino acid positions or nucleotide positions are then compared. When a position in the first sequence is occupied by the same amino acid residue or nucleotide as the corresponding position in the second sequence, then the molecules are identical at that position (as used herein amino acid or nucleic acid “identity” is equivalent to amino acid or nucleic acid “homology”). The percent identity between the two sequences is a function of the number of identical positions shared by the sequences, taking into account the number of gaps, and the length of each gap, which need to be introduced for optimal alignment of the two sequences.

[0738] The comparison of sequences and determination of percent identity between two sequences can be accomplished using a mathematical algorithm. In a preferred embodiment, the percent identity between two amino acid sequences is determined using the Needleman and Wunsch (J. Mol. Biol. (48):444-453 (1970)) algorithm which has been incorporated into the GAP program in the GCG software package (available at http://www.gcg.com), using either a Blosum 62 matrix or a PAM250 matrix, and a gap weight of 16, 14, 12, 10, 8, 6, or 4 and a length weight of 1, 2, 3, 4, 5, or 6. In yet another preferred embodiment, the percent identity between two nucleotide sequences is determined using the GAP program in the GCG software package (available at http://www.gcg.com), using a NWSgapdna.CMP matrix and a gap weight of 40, 50, 60, 70, or 80 and a length weight of 1, 2, 3, 4, 5, or 6. In another embodiment, the percent identity between two amino acid or nucleotide sequences is determined using the algorithm of E. Meyers and W. Miller (Comput. Appl. Biosci., 4:11-17 (1988)) which has been incorporated into the ALIGN program (version 2.0), using a PAM120 weight residue table, a gap length penalty of 12 and a gap penalty of 2 or 4.

[0739] The nucleic acid and protein sequences of the present invention can further be used as a “query sequence” to perform a search against public databases to, for example, identify other family members or related sequences. Such searches can be performed using the NBLAST and XBLAST programs (version 2.0) of Altschul, et al. (1990) J. Mol. Biol. 215:403-10. BLAST nucleotide searches can be performed with the NBLAST program, score=100, wordlength=12 to obtain nucleotide sequences homologous to IC23927 nucleic acid molecules of the invention. BLAST protein searches can be performed with the XBLAST program, score=100, wordlength=3, and a Blosum62 matrix to obtain amino acid sequences homologous to IC23927 protein molecules of the invention. To obtain gapped alignments for comparison purposes, Gapped BLAST can be utilized as described in Altschul et al., (1997) Nucleic Acids Res. 25(17):3389-3402. When utilizing BLAST and Gapped BLAST programs, the default parameters of the respective programs (e.g., XBLAST and NBLAST) can be used. See http://www.ncbi.nlm.nih.gov.

[0740] The invention also provides IC23927 chimeric or fusion proteins. As used herein, an IC23927 “chimeric protein” or “fusion protein” comprises an IC23927 polypeptide operatively linked to a non-IC23927 polypeptide. An “IC23927 polypeptide” refers to a polypeptide having an amino acid sequence corresponding to IC23927, whereas a “non-IC23927 polypeptide” refers to a polypeptide having an amino acid sequence corresponding to a protein which is not substantially homologous to the IC23927 protein, e.g., a protein which is different from the IC23927 protein and which is derived from the same or a different organism. Within an IC23927 fusion protein the IC23927 polypeptide can correspond to all or a portion of an IC23927 protein. In a preferred embodiment, an IC23927 fusion protein comprises at least one biologically active portion of an IC23927 protein. In another preferred embodiment, an IC23927 fusion protein comprises at least two biologically active portions of an IC23927 protein. Within the fusion protein, the term “operatively linked” is intended to indicate that the IC23927 polypeptide and the non-IC23927 polypeptide are fused in-frame to each other. The non-IC23927 polypeptide can be fused to the N-terminus or C-terminus of the IC23927 polypeptide.

[0741] For example, in one embodiment, the fusion protein is a GST-IC23927 fusion protein in which the IC23927 sequences are fused to the C-terminus of the GST sequences. Such fusion proteins can facilitate the purification of recombinant IC23927.

[0742] In another embodiment, the fusion protein is an IC23927 protein containing a heterologous signal sequence at its N-terminus. In certain host cells (e.g., bacterial or mammalian host cells), expression and/or secretion of IC23927 can be increased through use of a heterologous signal sequence.

[0743] The IC23927 fusion proteins of the invention can be incorporated into pharmaceutical compositions and administered to a subject in vivo. The IC23927 fusion proteins can be used to affect the bioavailability of an IC23927 ligand. Use of IC23927 fusion proteins may be useful therapeutically for the treatment of disorders caused by, for example, (i) aberrant modification or mutation of a gene encoding an IC23927 protein; (ii) mis-regulation of the IC23927 gene; and (iii) aberrant post-translational modification of an IC23927 protein.

[0744] Moreover, the IC23927-fusion proteins of the invention can be used as immunogens to produce anti-IC23927 antibodies in a subject, to purify IC23927 ligands and in screening assays to identify molecules which inhibit the interaction of IC23927 with an IC23927 ligand or target molecule.

[0745] Preferably, an IC23927 chimeric or fusion protein of the invention is produced by standard recombinant DNA techniques. For example, DNA fragments coding for the different polypeptide sequences are ligated together in-frame in accordance with conventional techniques, for example by employing blunt-ended or stagger-ended termini for ligation, restriction enzyme digestion to provide for appropriate termini, filling-in of cohesive ends as appropriate, alkaline phosphatase treatment to avoid undesirable joining, and enzymatic ligation. In another embodiment, the fusion gene can be synthesized by conventional techniques including automated DNA synthesizers. Alternatively, PCR amplification of gene fragments can be carried out using anchor primers which give rise to complementary overhangs between two consecutive gene fragments which can subsequently be annealed and reamplified to generate a chimeric gene sequence (see, for example, Current Protocols in Molecular Biology, eds. Ausubel et al. John Wiley & Sons: 1992). Moreover, many expression vectors are commercially available that already encode a fusion moiety (e.g., a GST polypeptide). An IC23927-encoding nucleic acid can be cloned into such an expression vector such that the fusion moiety is linked in-frame to the IC23927 protein.

[0746] The present invention also pertains to variants of the IC23927 proteins which function as either IC23927 agonists (mimetics) or as IC23927 antagonists. Variants of the IC23927 proteins can be generated by mutagenesis, e.g., discrete point mutation or truncation of an IC23927 protein. An agonist of the IC23927 proteins can retain substantially the same, or a subset, of the biological activities of the naturally occurring form of an IC23927 protein. An antagonist of an IC23927 protein can inhibit one or more of the activities of the naturally occurring form of the IC23927 protein by, for example, competitively modulating an IC23927-mediated activity of an IC23927 protein. Thus, specific biological effects can be elicited by treatment with a variant of limited function. In one embodiment, treatment of a subject with a variant having a subset of the biological activities of the naturally occurring form of the protein has fewer side effects in a subject relative to treatment with the naturally occurring form of the IC23927 protein.

[0747] In one embodiment, variants of an IC23927 protein which function as either IC23927 agonists (mimetics) or as IC23927 antagonists can be identified by screening combinatorial libraries of mutants, e.g., truncation mutants, of an IC23927 protein for IC23927 protein agonist or antagonist activity. In one embodiment, a variegated library of IC23927 variants is generated by combinatorial mutagenesis at the nucleic acid level and is encoded by a variegated gene library. A variegated library of IC23927 variants can be produced by, for example, enzymatically ligating a mixture of synthetic oligonucleotides into gene sequences such that a degenerate set of potential IC23927 sequences is expressible as individual polypeptides, or alternatively, as a set of larger fusion proteins (e.g., for phage display) containing the set of IC23927 sequences therein. There are a variety of methods which can be used to produce libraries of potential IC23927 variants from a degenerate oligonucleotide sequence. Chemical synthesis of a degenerate gene sequence can be performed in an automatic DNA synthesizer, and the synthetic gene then ligated into an appropriate expression vector. Use of a degenerate set of genes allows for the provision, in one mixture, of all of the sequences encoding the desired set of potential IC23927 sequences. Methods for synthesizing degenerate oligonucleotides are known in the art (see, e.g., Narang, S. A. (1983) Tetrahedron 39:3; Itakura et al. (1984) Annu. Rev. Biochem. 53:323; Itakura et al. (1984) Science 198:1056; Ike et al. (1983) Nucleic Acid Res. 11:477.

[0748] In addition, libraries of fragments of an IC23927 protein coding sequence can be used to generate a variegated population of IC23927 fragments for screening and subsequent selection of variants of an IC23927 protein. In one embodiment, a library of coding sequence fragments can be generated by treating a double stranded PCR fragment of an IC23927 coding sequence with a nuclease under conditions wherein nicking occurs only about once per molecule, denaturing the double stranded DNA, renaturing the DNA to form double stranded DNA which can include sense/antisense pairs from different nicked products, removing single stranded portions from reformed duplexes by treatment with S1 nuclease, and ligating the resulting fragment library into an expression vector. By this method, an expression library can be derived which encodes N-terminal, C-terminal and internal fragments of various sizes of the IC23927 protein.

[0749] Several techniques are known in the art for screening gene products of combinatorial libraries made by point mutations or truncation, and for screening cDNA libraries for gene products having a selected property. Such techniques are adaptable for rapid screening of the gene libraries generated by the combinatorial mutagenesis of IC23927 proteins. The most widely used techniques, which are amenable to high through-put analysis, for screening large gene libraries typically include cloning the gene library into replicable expression vectors, transforming appropriate cells with the resulting library of vectors, and expressing the combinatorial genes under conditions in which detection of a desired activity facilitates isolation of the vector encoding the gene whose product was detected. Recursive ensemble mutagenesis (REM), a new technique which enhances the frequency of functional mutants in the libraries, can be used in combination with the screening assays to identify IC23927 variants (Arkin and Youvan (1992) Proc. Natl. Acad. Sci. USA 89:7811-7815; Delagrave et al. (1993) Protein Engineering 6(3):327-331).

[0750] In one embodiment, cell based assays can be exploited to analyze a variegated IC23927 library. For example, a library of expression vectors can be transfected into a cell line, e.g., an endothelial cell line, which ordinarily responds to IC23927 in a particular IC23927 ligand-dependent manner. The transfected cells are then contacted with IC23927-ligand and the effect of expression of the mutant on signaling by IC23927 can be detected, e.g., by monitoring calcium, IP3, or diacylglycerol concentration, phosphorylation profile of intracellular proteins, or intracellular ion concentration. Plasmid DNA can then be recovered from the cells which score for inhibition, or alternatively, potentiation of signaling by the IC23927 ligand, and the individual clones further characterized.

[0751] An isolated IC23927 protein, or a portion or fragment thereof, can be used as an immunogen to generate antibodies that bind IC23927 using standard techniques for polyclonal and monoclonal antibody preparation. A full-length IC23927 protein can be used or, alternatively, the invention provides antigenic peptide fragments of IC23927 for use as immunogens. The antigenic peptide of IC23927 comprises at least 8 amino acid residues of the amino acid sequence shown in SEQ ID NO:22 and encompasses an epitope of IC23927 such that an antibody raised against the peptide forms a specific immune complex with IC23927. Preferably, the antigenic peptide comprises at least 10 amino acid residues, more preferably at least 15 amino acid residues, even more preferably at least 20 amino acid residues, and most preferably at least 30 amino acid residues.

[0752] Preferred epitopes encompassed by the antigenic peptide are regions of IC23927 that are located on the surface of the protein, e.g., hydrophilic regions, as well as regions with high antigenicity (see, for example, FIG. 17).

[0753] An IC23927 immunogen typically is used to prepare antibodies by immunizing a suitable subject, (e.g., rabbit, goat, mouse or other mammal) with the immunogen. An appropriate immunogenic preparation can contain, for example, recombinantly expressed IC23927 protein or a chemically synthesized IC23927 polypeptide. The preparation can further include an adjuvant, such as Freund's complete or incomplete adjuvant, or similar immunostimulatory agent. Immunization of a suitable subject with an immunogenic IC23927 preparation induces a polyclonal anti-IC23927 antibody response.

[0754] Accordingly, another aspect of the invention pertains to anti-IC23927 antibodies. The term “antibody” as used herein refers to immunoglobulin molecules and immunologically active portions of immunoglobulin molecules, i.e., molecules that contain an antigen binding site which specifically binds (immunoreacts with) an antigen, such as IC23927. Examples of immunologically active portions of immunoglobulin molecules include F(ab) and F(ab′)₂ fragments which can be generated by treating the antibody with an enzyme such as pepsin. The invention provides polyclonal and monoclonal antibodies that bind IC23927. The term “monoclonal antibody” or “monoclonal antibody composition”, as used herein, refers to a population of antibody molecules that contain only one species of an antigen binding site capable of immunoreacting with a particular epitope of IC23927. A monoclonal antibody composition thus typically displays a single binding affinity for a particular IC23927 protein with which it immunoreacts.

[0755] Polyclonal anti-IC23927 antibodies can be prepared as described above by immunizing a suitable subject with an IC23927 immunogen. The anti-IC23927 antibody titer in the immunized subject can be monitored over time by standard techniques, such as with an enzyme linked immunosorbent assay (ELISA) using immobilized IC23927. If desired, the antibody molecules directed against IC23927 can be isolated from the mammal (e.g., from the blood) and further purified by well known techniques, such as protein A chromatography to obtain the IgG fraction. At an appropriate time after immunization, e.g., when the anti-IC23927 antibody titers are highest, antibody-producing cells can be obtained from the subject and used to prepare monoclonal antibodies by standard techniques, such as the hybridoma technique originally described by Kohler and Milstein (1975) Nature 256:495-497) (see also, Brown et al. (1981) J. Immunol. 127:539-46; Brown et al. (1980) J. Biol. Chem. 255:4980-83; Yeh et al. (1976) Proc. Natl. Acad. Sci. USA 76:2927-31; and Yeh et al. (1982) Int. J. Cancer 29:269-75), the more recent human B cell hybridoma technique (Kozbor et al. (1983) Immunol Today 4:72), the EBV-hybridoma technique (Cole et al. (1985), Monoclonal Antibodies and Cancer Therapy, Alan R. Liss, Inc., pp. 77-96) or trioma techniques. The technology for producing monoclonal antibody hybridomas is well known (see generally R. H. Kenneth, in Monoclonal Antibodies: A New Dimension In Biological Analyses, Plenum Publishing Corp., New York, N.Y. (1980); E. A. Lerner (1981) Yale J. Biol. Med, 54:387-402; M. L. Gefter et al. (1977) Somatic Cell Genet. 3:231-36). Briefly, an immortal cell line (typically a myeloma) is fused to lymphocytes (typically splenocytes) from a mammal immunized with an IC23927 immunogen as described above, and the culture supernatants of the resulting hybridoma cells are screened to identify a hybridoma producing a monoclonal antibody that binds IC23927.

[0756] Any of the many well known protocols used for fusing lymphocytes and immortalized cell lines can be applied for the purpose of generating an anti-IC23927 monoclonal antibody (see, e.g., G. Galfre et al. (1977) Nature 266:55052; Gefter et al. Somatic Cell Genet., cited supra; Lerner, Yale J. Biol. Med., cited supra; Kenneth, Monoclonal Antibodies, cited supra). Moreover, the ordinarily skilled worker will appreciate that there are many variations of such methods which also would be useful. Typically, the immortal cell line (e.g., a myeloma cell line) is derived from the same mammalian species as the lymphocytes. For example, murine hybridomas can be made by fusing lymphocytes from a mouse immunized with an immunogenic preparation of the present invention with an immortalized mouse cell line. Preferred immortal cell lines are mouse myeloma cell lines that are sensitive to culture medium containing hypoxanthine, aminopterin and thymidine (“HAT medium”). Any of a number of myeloma cell lines can be used as a fusion partner according to standard techniques, e.g., the P3-NS1/1-Ag4-1, P3-x63-Ag8.653 or Sp2/O-Ag14 myeloma lines. These myeloma lines are available from ATCC Typically, HAT-sensitive mouse myeloma cells are fused to mouse splenocytes using polyethylene glycol (“PEG”). Hybridoma cells resulting from the fusion are then selected using HAT medium, which kills unfused and unproductively fused myeloma cells (unfused splenocytes die after several days because they are not transformed). Hybridoma cells producing a monoclonal antibody of the invention are detected by screening the hybridoma culture supernatants for antibodies that bind IC23927, e.g., using a standard ELISA assay.

[0757] Alternative to preparing monoclonal antibody-secreting hybridomas, a monoclonal anti-IC23927 antibody can be identified and isolated by screening a recombinant combinatorial immunoglobulin library (e.g., an antibody phage display library) with IC23927 to thereby isolate immunoglobulin library members that bind IC23927. Kits for generating and screening phage display libraries are commercially available (e.g., the Pharmacia Recombinant Phage Antibody System, Catalog No. 27-9400-01; and the Stratagene SurfZAP™ Phage Display Kit, Catalog No. 240612). Additionally, examples of methods and reagents particularly amenable for use in generating and screening antibody display library can be found in, for example, Ladner et al. U.S. Pat. No. 5,223,409; Kang et al. PCT International Publication No. WO 92/18619; Dower et al. PCT International Publication No. WO 91/17271; Winter et al. PCT International Publication WO 92/20791; Markland et al. PCT International Publication No. WO 92/15679; Breitling et al. PCT International Publication WO 93/01288; McCafferty et al. PCT International Publication No. WO 92/01047; Garrard et al. PCT International Publication No. WO 92/09690; Ladner et al. PCT International Publication No. WO 90/02809; Fuchs et al. (1991) Bio/Technology 9:1370-1372; Hay et al. (1992) Hum. Antibod. Hybridomas 3:81-85; Huse et al. (1989) Science 246:1275-1281; Griffiths et al. (1993) EMBO J 12:725-734; Hawkins et al. (1992) J. Mol. Biol. 226:889-896; Clackson et al. (1991) Nature 352:624-628; Gram et al. (1992) Proc. Natl. Acad. Sci. USA 89:3576-3580; Garrard et al. (1991) Bio/Technology 9:1373-1377; Hoogenboom et al. (1991) Nuc. Acid Res. 19:4133-4137; Barbas et al. (1991) Proc. Natl. Acad. Sci. USA 88:7978-7982; and McCafferty et al. Nature (1990) 348:552-554.

[0758] Additionally, recombinant anti-IC23927 antibodies, such as chimeric and humanized monoclonal antibodies, comprising both human and non-human portions, which can be made using standard recombinant DNA techniques, are within the scope of the invention. Such chimeric and humanized monoclonal antibodies can be produced by recombinant DNA techniques known in the art, for example using methods described in Robinson et al. International Application No. PCT/US86/02269; Akira, et al. European Patent Application 184,187; Taniguchi, M., European Patent Application 171,496; Morrison et al. European Patent Application 173,494; Neuberger et al. PCT International Publication No. WO 86/01533; Cabilly et al. U.S. Pat. No. 4,816,567; Cabilly et al. European Patent Application 125,023; Better et al. (1988) Science 240:1041-1043; Liu et al. (1987) Proc. Natl. Acad. Sci. USA 84:3439-3443; Liu et al. (1987) J. Immunol. 139:3521-3526; Sun et al. (1987) Proc. Natl. Acad. Sci. USA 84:214-218; Nishimura et al. (1987) Canc. Res. 47:999-1005; Wood et al. (1985) Nature 314:446-449; and Shaw et al. (1988) J. Natl. Cancer Inst. 80:1553-1559); Morrison, S. L. (1985) Science 229:1202-1207; Oi et al. (1986) BioTechniques 4:214; Winter U.S. Pat. No. 5,225,539; Jones et al. (1986) Nature 321:552-525; Verhoeyen et al. (1988) Science 239:1534; and Beidler et al. (1988) J. Immunol. 141:4053-4060.

[0759] An anti-IC23927 antibody (e.g., monoclonal antibody) can be used to isolate IC23927 by standard techniques, such as affinity chromatography or immunoprecipitation. An anti-IC23927 antibody can facilitate the purification of natural IC23927 from cells and of recombinantly produced IC23927 expressed in host cells. Moreover, an anti-IC23927 antibody can be used to detect IC23927 protein (e.g., in a cellular lysate or cell supernatant) in order to evaluate the abundance and pattern of expression of the IC23927 protein. Anti-IC23927 antibodies can be used diagnostically to monitor protein levels in tissue as part of a clinical testing procedure, e.g., to, for example, determine the efficacy of a given treatment regimen. Detection can be facilitated by coupling (i.e., physically linking) the antibody to a detectable substance. Examples of detectable substances include various enzymes, prosthetic groups, fluorescent materials, luminescent materials, bioluminescent materials, and radioactive materials. Examples of suitable enzymes include horseradish peroxidase, alkaline phosphatase, β-galactosidase, or acetylcholinesterase; examples of suitable prosthetic group complexes include streptavidin/biotin and avidin/biotin; examples of suitable fluorescent materials include umbelliferone, fluorescein, fluorescein isothiocyanate, rhodamine, dichlorotriazinylamine fluorescein, dansyl chloride or phycoerythrin; an example of a luminescent material includes luminol; examples of bioluminescent materials include luciferase, luciferin, and aequorin, and examples of suitable radioactive material include ¹²⁵I, ¹³¹I, ³⁵S or ³H.

[0760] II. Recombinant Expression Vectors and Host Cells

[0761] Another aspect of the invention pertains to vectors, preferably expression vectors, containing a nucleic acid encoding an IC23927 protein (or a portion thereof). As used herein, the term “vector” refers to a nucleic acid molecule capable of transporting another nucleic acid to which it has been linked. One type of vector is a “plasmid”, which refers to a circular double stranded DNA loop into which additional DNA segments can be ligated. Another type of vector is a viral vector, wherein additional DNA segments can be ligated into the viral genome. Certain vectors are capable of autonomous replication in a host cell into which they are introduced (e.g., bacterial vectors having a bacterial origin of replication and episomal mammalian vectors). Other vectors (e.g., non-episomal mammalian vectors) are integrated into the genome of a host cell upon introduction into the host cell, and thereby are replicated along with the host genome. Moreover, certain vectors are capable of directing the expression of genes to which they are operatively linked. Such vectors are referred to herein as “expression vectors”. In general, expression vectors of utility in recombinant DNA techniques are often in the form of plasmids. In the present specification, “plasmid” and “vector” can be used interchangeably as the plasmid is the most commonly used form of vector. However, the invention is intended to include such other forms of expression vectors, such as viral vectors (e.g., replication defective retroviruses, adenoviruses and adeno-associated viruses), which serve equivalent functions.

[0762] The recombinant expression vectors of the invention comprise a nucleic acid of the invention in a form suitable for expression of the nucleic acid in a host cell, which means that the recombinant expression vectors include one or more regulatory sequences, selected on the basis of the host cells to be used for expression, which is operatively linked to the nucleic acid sequence to be expressed. Within a recombinant expression vector, “operably linked” is intended to mean that the nucleotide sequence of interest is linked to the regulatory sequence(s) in a manner which allows for expression of the nucleotide sequence (e.g., in an in vitro transcription/translation system or in a host cell when the vector is introduced into the host cell). The term “regulatory sequence” is intended to include promoters, enhancers and other expression control elements (e.g., polyadenylation signals). Such regulatory sequences are described, for example, in Goeddel; Gene Expression Technology: Methods in Enzymology 185, Academic Press, San Diego, Calif. (1990). Regulatory sequences include those which direct constitutive expression of a nucleotide sequence in many types of host cells and those which direct expression of the nucleotide sequence only in certain host cells (e.g., tissue-specific regulatory sequences). It will be appreciated by those skilled in the art that the design of the expression vector can depend on such factors as the choice of the host cell to be transformed, the level of expression of protein desired, and the like. The expression vectors of the invention can be introduced into host cells to thereby produce proteins or peptides, including fusion proteins or peptides, encoded by nucleic acids as described herein (e.g., IC23927 proteins, mutant forms of IC23927 proteins, fusion proteins, and the like).

[0763] The recombinant expression vectors of the invention can be designed for expression of IC23927 proteins in prokaryotic or eukaryotic cells. For example, IC23927 proteins can be expressed in bacterial cells such as E. coli, insect cells (using baculovirus expression vectors) yeast cells or mammalian cells. Suitable host cells are discussed further in Goeddel, Gene Expression Technology: Methods in Enzymology 185, Academic Press, San Diego, Calif. (1990). Alternatively, the recombinant expression vector can be transcribed and translated in vitro, for example using T7 promoter regulatory sequences and T7 polymerase.

[0764] Expression of proteins in prokaryotes is most often carried out in E. coli with vectors containing constitutive or inducible promoters directing the expression of either fusion or non-fusion proteins. Fusion vectors add a number of amino acids to a protein encoded therein, usually to the amino terminus of the recombinant protein. Such fusion vectors typically serve three purposes: 1) to increase expression of recombinant protein; 2) to increase the solubility of the recombinant protein; and 3) to aid in the purification of the recombinant protein by acting as a ligand in affinity purification. Often, in fusion expression vectors, a proteolytic cleavage site is introduced at the junction of the fusion moiety and the recombinant protein to enable separation of the recombinant protein from the fusion moiety subsequent to purification of the fusion protein. Such enzymes, and their cognate recognition sequences, include Factor Xa, thrombin and enterokinase. Typical fusion expression vectors include pGEX (Pharmacia Biotech Inc; Smith, D. B. and Johnson, K. S. (1988) Gene 67:31-40), pMAL (New England Biolabs, Beverly, Mass.) and pRIT5 (Pharmacia, Piscataway, N.J.) which fuse glutathione S-transferase (GST), maltose E binding protein, or protein A, respectively, to the target recombinant protein.

[0765] Purified fusion proteins can be utilized in IC23927 activity assays, (e.g., direct assays or competitive assays described in detail below), or to generate antibodies specific for IC23927 proteins, for example. In a preferred embodiment, an IC23927 fusion protein expressed in a retroviral expression vector of the present invention can be utilized to infect bone marrow cells which are subsequently transplanted into irradiated recipients. The pathology of the subject recipient is then examined after sufficient time has passed (e.g., six (6) weeks).

[0766] Examples of suitable inducible non-fusion E. coli expression vectors include pTrc (Amann et al., (1988) Gene 69:301-315) and pET 11d (Studier et al., Gene Expression Technology: Methods in Enzymology 185, Academic Press, San Diego, Calif. (1990) 60-89). Target gene expression from the pTrc vector relies on host RNA polymerase transcription from a hybrid trp-lac fusion promoter. Target gene expression from the pET 11d vector relies on transcription from a T7 gn10-lac fusion promoter mediated by a coexpressed viral RNA polymerase (T7 gn1). This viral polymerase is supplied by host strains BL21(DE3) or HMS174(DE3) from a resident prophage harboring a T7 gn1 gene under the transcriptional control of the lacUV 5 promoter.

[0767] One strategy to maximize recombinant protein expression in E. coli is to express the protein in a host bacteria with an impaired capacity to proteolytically cleave the recombinant protein (Gottesman, S., Gene Expression Technology: Methods in Enzymology 185, Academic Press, San Diego, Calif. (1990) 119-128). Another strategy is to alter the nucleic acid sequence of the nucleic acid to be inserted into an expression vector so that the individual codons for each amino acid are those preferentially utilized in E. coli (Wada et al., (1992) Nucleic Acids Res. 20:2111-2118). Such alteration of nucleic acid sequences of the invention can be carried out by standard DNA synthesis techniques.

[0768] In another embodiment, the IC23927 expression vector is a yeast expression vector. Examples of vectors for expression in yeast S. cerevisiae include pYepSec1 (Baldari, et al., (1987) EMBO J. 6:229-234), pMFa (Kurjan and Herskowitz, (1982) Cell 30:933-943), pJRY88 (Schultz et al., (1987) Gene 54:113-123), pYES2 (Invitrogen Corporation, San Diego, Calif.), and picZ (Invitrogen Corporation, San Diego, Calif.).

[0769] Alternatively, IC23927 proteins can be expressed in insect cells using baculovirus expression vectors. Baculovirus vectors available for expression of proteins in cultured insect cells (e.g., Sf 9 cells) include the pAc series (Smith et al. (1983) Mol. Cell Biol. 3:2156-2165) and the pVL series (Lucklow and Summers (1989) Virology 170:31-39).

[0770] In yet another embodiment, a nucleic acid of the invention is expressed in mammalian cells using a mammalian expression vector. Examples of mammalian expression vectors include pCDM8 (Seed, B. (1987) Nature 329:840) and pMT2PC (Kaufman et al. (1987) EMBO J. 6:187-195). When used in mammalian cells, the expression vector's control functions are often provided by viral regulatory elements. For example, commonly used promoters are derived from polyoma, Adenovirus 2, cytomegalovirus and Simian Virus 40. For other suitable expression systems for both prokaryotic and eukaryotic cells see chapters 16 and 17 of Sambrook, J., Fritsh, E. F., and Maniatis, T. Molecular Cloning: A Laboratory Manual. 2nd, ed., Cold Spring Harbor Laboratory, Cold Spring Harbor Laboratory Press, Cold Spring Harbor, N.Y., 1989.

[0771] In another embodiment, the recombinant mammalian expression vector is capable of directing expression of the nucleic acid preferentially in a particular cell type (e.g., tissue-specific regulatory elements are used to express the nucleic acid). Tissue-specific regulatory elements are known in the art. Non-limiting examples of suitable tissue-specific promoters include the albumin promoter (liver-specific; Pinkert et al. (1987) Genes Dev. 1:268-277), lymphoid-specific promoters (Calame and Eaton (1988) Adv. Immunol. 43:235-275), in particular promoters of T cell receptors (Winoto and Baltimore (1989) EMBO J. 8:729-733) and immunoglobulins (Banerji et al. (1983) Cell 33:729-740; Queen and Baltimore (1983) Cell 33:741-748), neuron-specific promoters (e.g., the neurofilament promoter; Byrne and Ruddle (1989) Proc. Natl. Acad. Sci. USA 86:5473-5477), pancreas-specific promoters (Edlund et al. (1985) Science 230:912-916), and mammary gland-specific promoters (e.g., milk whey promoter; U.S. Pat. No. 4,873,316 and European Application Publication No. 264,166). Developmentally-regulated promoters are also encompassed, for example the murine hox promoters (Kessel and Gruss (1990) Science 249:374-379) and the α-fetoprotein promoter (Campes and Tilghman (1989) Genes Dev. 3:537-546).

[0772] The invention further provides a recombinant expression vector comprising a DNA molecule of the invention cloned into the expression vector in an antisense orientation. That is, the DNA molecule is operatively linked to a regulatory sequence in a manner which allows for expression (by transcription of the DNA molecule) of an RNA molecule which is antisense to IC23927 mRNA. Regulatory sequences operatively linked to a nucleic acid cloned in the antisense orientation can be chosen which direct the continuous expression of the antisense RNA molecule in a variety of cell types, for instance viral promoters and/or enhancers, or regulatory sequences can be chosen which direct constitutive, tissue specific or cell type specific expression of antisense RNA. The antisense expression vector can be in the form of a recombinant plasmid, phagemid or attenuated virus in which antisense nucleic acids are produced under the control of a high efficiency regulatory region, the activity of which can be determined by the cell type into which the vector is introduced. For a discussion of the regulation of gene expression using antisense genes see Weintraub, H. et al., Antisense RNA as a molecular tool for genetic analysis, Reviews—Trends in Genetics, Vol. 1(1) 1986.

[0773] Another aspect of the invention pertains to host cells into which an IC23927 nucleic acid molecule of the invention is introduced, e.g., an IC23927 nucleic acid molecule within a recombinant expression vector or an IC23927 nucleic acid molecule containing sequences which allow it to homologously recombine into a specific site of the host cell's genome. The terms “host cell” and “recombinant host cell” are used interchangeably herein. It is understood that such terms refer not only to the particular subject cell but to the progeny or potential progeny of such a cell. Because certain modifications may occur in succeeding generations due to either mutation or environmental influences, such progeny may not, in fact, be identical to the parent cell, but are still included within the scope of the term as used herein.

[0774] A host cell can be any prokaryotic or eukaryotic cell. For example, an IC23927 protein can be expressed in bacterial cells such as E. coli, insect cells, yeast or mammalian cells (such as Chinese hamster ovary cells (CHO) or COS cells). Other suitable host cells are known to those skilled in the art.

[0775] Vector DNA can be introduced into prokaryotic or eukaryotic cells via conventional transformation or transfection techniques. As used herein, the terms “transformation” and “transfection” are intended to refer to a variety of art-recognized techniques for introducing foreign nucleic acid (e.g., DNA) into a host cell, including calcium phosphate or calcium chloride co-precipitation, DEAE-dextran-mediated transfection, lipofection, or electroporation. Suitable methods for transforming or transfecting host cells can be found in Sambrook, et al. (Molecular Cloning: A Laboratory Manual. 2nd, ed., Cold Spring Harbor Laboratory, Cold Spring Harbor Laboratory Press, Cold Spring Harbor, N.Y., 1989), and other laboratory manuals.

[0776] For stable transfection of mammalian cells, it is known that, depending upon the expression vector and transfection technique used, only a small fraction of cells may integrate the foreign DNA into their genome. In order to identify and select these integrants, a gene that encodes a selectable marker (e.g., resistance to antibiotics) is generally introduced into the host cells along with the gene of interest. Preferred selectable markers include those which confer resistance to drugs, such as G418, hygromycin and methotrexate. Nucleic acid encoding a selectable marker can be introduced into a host cell on the same vector as that encoding an IC23927 protein or can be introduced on a separate vector. Cells stably transfected with the introduced nucleic acid can be identified by drug selection (e.g., cells that have incorporated the selectable marker gene will survive, while the other cells die).

[0777] A host cell of the invention, such as a prokaryotic or eukaryotic host cell in culture, can be used to produce (ie., express) an IC23927 protein. Accordingly, the invention further provides methods for producing an IC23927 protein using the host cells of the invention. In one embodiment, the method comprises culturing the host cell of the invention (into which a recombinant expression vector encoding an IC23927 protein has been introduced) in a suitable medium such that an IC23927 protein is produced. In another embodiment, the method further comprises isolating an IC23927 protein from the medium or the host cell.

[0778] The host cells of the invention can also be used to produce non-human transgenic animals. For example, in one embodiment, a host cell of the invention is a fertilized oocyte or an embryonic stem cell into which IC23927-coding sequences have been introduced. Such host cells can then be used to create non-human transgenic animals in which exogenous IC23927 sequences have been introduced into their genome or homologous recombinant animals in which endogenous IC23927 sequences have been altered. Such animals are useful for studying the function and/or activity of an IC23927 and for identifying and/or evaluating modulators of IC23927 activity. As used herein, a “transgenic animal” is a non-human animal, preferably a mammal, more preferably a rodent such as a rat or mouse, in which one or more of the cells of the animal includes a transgene. Other examples of transgenic animals include non-human primates, sheep, dogs, cows, goats, chickens, amphibians, and the like. A transgene is exogenous DNA which is integrated into the genome of a cell from which a transgenic animal develops and which remains in the genome of the mature animal, thereby directing the expression of an encoded gene product in one or more cell types or tissues of the transgenic animal. As used herein, a “homologous recombinant animal” is a non-human animal, preferably a mammal, more preferably a mouse, in which an endogenous IC23927 gene has been altered by homologous recombination between the endogenous gene and an exogenous DNA molecule introduced into a cell of the animal, e.g., an embryonic cell of the animal, prior to development of the animal.

[0779] A transgenic animal of the invention can be created by introducing an IC23927-encoding nucleic acid into the male pronuclei of a fertilized oocyte, e.g., by microinjection, retroviral infection, and allowing the oocyte to develop in a pseudopregnant female foster animal. The IC23927 cDNA sequence of SEQ ID NO:21 can be introduced as a transgene into the genome of a non-human animal. Alternatively, a nonhuman homologue of a human IC23927 gene, such as a mouse or rat IC23927 gene, can be used as a transgene. Alternatively, an IC23927 gene homologue, such as another IC23927 family member, can be isolated based on hybridization to the IC23927 cDNA sequences of SEQ ID NO:21 or 23, or the DNA insert of the plasmid deposited with ATCC as Accession Number ______ (described further in subsection I above) and used as a transgene. Intronic sequences and polyadenylation signals can also be included in the transgene to increase the efficiency of expression of the transgene. A tissue-specific regulatory sequence(s) can be operably linked to an IC23927 transgene to direct expression of an IC23927 protein to particular cells. Methods for generating transgenic animals via embryo manipulation and microinjection, particularly animals such as mice, have become conventional in the art and are described, for example, in U.S. Pat. Nos. 4,736,866 and 4,870,009, both by Leder et al., U.S. Pat. No. 4,873,191 by Wagner et al. and in Hogan, B., Manipulating the Mouse Embryo, (Cold Spring Harbor Laboratory Press, Cold Spring Harbor, N.Y., 1986). Similar methods are used for production of other transgenic animals. A transgenic founder animal can be identified based upon the presence of an IC23927 transgene in its genome and/or expression of IC23927 mRNA in tissues or cells of the animals. A transgenic founder animal can then be used to breed additional animals carrying the transgene. Moreover, transgenic animals carrying a transgene encoding an IC23927 protein can further be bred to other transgenic animals carrying other transgenes.

[0780] To create a homologous recombinant animal, a vector is prepared which contains at least a portion of an IC23927 gene into which a deletion, addition or substitution has been introduced to thereby alter, e.g., functionally disrupt, the IC23927 gene. The IC23927 gene can be a human gene (e.g., the cDNA of SEQ ID NO:23), but more preferably, is a non-human homologue of a human IC23927 gene (e.g., a cDNA isolated by stringent hybridization with the nucleotide sequence of SEQ ID NO:21). For example, a mouse IC23927 gene can be used to construct a homologous recombination nucleic acid molecule, e.g., a vector, suitable for altering an endogenous IC23927 gene in the mouse genome. In a preferred embodiment, the homologous recombination nucleic acid molecule is designed such that, upon homologous recombination, the endogenous IC23927 gene is functionally disrupted (i.e., no longer encodes a functional protein; also referred to as a “knock out” vector). Alternatively, the homologous recombination nucleic acid molecule can be designed such that, upon homologous recombination, the endogenous IC23927 gene is mutated or otherwise altered but still encodes functional protein (e.g., the upstream regulatory region can be altered to thereby alter the expression of the endogenous IC23927 protein). In the homologous recombination nucleic acid molecule, the altered portion of the IC23927 gene is flanked at its 5′ and 3′ ends by additional nucleic acid sequence of the IC23927 gene to allow for homologous recombination to occur between the exogenous IC23927 gene carried by the homologous recombination nucleic acid molecule and an endogenous IC23927 gene in a cell, e.g., an embryonic stem cell. The additional flanking IC23927 nucleic acid sequence is of sufficient length for successful homologous recombination with the endogenous gene. Typically, several kilobases of flanking DNA (both at the 5′ and 3′ ends) are included in the homologous recombination nucleic acid molecule (see, e.g., Thomas, K. R. and Capecchi, M. R. (1987) Cell 51:503 for a description of homologous recombination vectors). The homologous recombination nucleic acid molecule is introduced into a cell, e.g., an embryonic stem cell line (e.g., by electroporation) and cells in which the introduced IC23927 gene has homologously recombined with the endogenous IC23927 gene are selected (see e.g., Li, E. et al. (1992) Cell 69:915). The selected cells can then injected into a blastocyst of an animal (e.g., a mouse) to form aggregation chimeras (see e.g., Bradley, A. in Teratocarcinomas and Embryonic Stem Cells: A Practical Approach, E. J. Robertson, ed. (IRL, Oxford, 1987) pp. 113-152). A chimeric embryo can then be implanted into a suitable pseudopregnant female foster animal and the embryo brought to term. Progeny harboring the homologously recombined DNA in their germ cells can be used to breed animals in which all cells of the animal contain the homologously recombined DNA by germline transmission of the transgene. Methods for constructing homologous recombination nucleic acid molecules, e.g., vectors, or homologous recombinant animals are described further in Bradley, A. (1991) Current Opinion in Biotechnology 2:823-829 and in PCT International Publication Nos.: WO 90/11354 by Le Mouellec et al.; WO 91/01140 by Smithies et al.; WO 92/0968 by Zijlstra et al.; and WO 93/04169 by Berns et al.

[0781] In another embodiment, transgenic non-human animals can be produced which contain selected systems which allow for regulated expression of the transgene. One example of such a system is the cre/loxP recombinase system of bacteriophage P1. For a description of the cre/loxP recombinase system, see, e.g., Lakso et al. (1992) Proc. Natl. Acad. Sci. USA 89:6232-6236. Another example of a recombinase system is the FLP recombinase system of Saccharomyces cerevisiae (O'Gorman et al. (1991) Science 251:1351-1355. If a cre/loxP recombinase system is used to regulate expression of the transgene, animals containing transgenes encoding both the Cre recombinase and a selected protein are required. Such animals can be provided through the construction of “double” transgenic animals, e.g., by mating two transgenic animals, one containing a transgene encoding a selected protein and the other containing a transgene encoding a recombinase.

[0782] Clones of the non-human transgenic animals described herein can also be produced according to the methods described in Wilmut, I. et al. (1997) Nature 385:810-813 and PCT International Publication Nos. WO 97/07668 and WO 97/07669. In brief, a cell, e.g., a somatic cell, from the transgenic animal can be isolated and induced to exit the growth cycle and enter G_{O} phase. The quiescent cell can then be fused, e.g., through the use of electrical pulses, to an enucleated oocyte from an animal of the same species from which the quiescent cell is isolated. The reconstructed oocyte is then cultured such that it develops to morula or blastocyte and then transferred to pseudopregnant female foster animal. The offspring borne of this female foster animal will be a clone of the animal from which the cell, e.g., the somatic cell, is isolated.

[0783] IV. Pharmaceutical Compositions

[0784] The IC23927 nucleic acid molecules, IC23927 proteins, fragments of IC23927 proteins, IC23927 modulators and anti-IC23927 antibodies (also referred to herein as “active compounds”) of the invention can be incorporated into pharmaceutical compositions suitable for administration. Such compositions typically comprise the nucleic acid molecule, protein, or antibody and a pharmaceutically acceptable carrier. As used herein the language “pharmaceutically acceptable carrier” is intended to include any and all solvents, dispersion media, coatings, antibacterial and antifungal agents, isotonic and absorption delaying agents, and the like, compatible with pharmaceutical administration. The use of such media and agents for pharmaceutically active substances is well known in the art. Except insofar as any conventional media or agent is incompatible with the active compound, use thereof in the compositions is contemplated. Supplementary active compounds can also be incorporated into the compositions.

[0785] A pharmaceutical composition of the invention is formulated to be compatible with its intended route of administration. Examples of routes of administration include parenteral, e.g, intravenous, intradermal, subcutaneous, oral (e.g., inhalation), transdermal (topical), transmucosal, and rectal administration. Solutions or suspensions used for parenteral, intradermal, or subcutaneous application can include the following components: a sterile diluent such as water for injection, saline solution, fixed oils, polyethylene glycols, glycerine, propylene glycol or other synthetic solvents; antibacterial agents such as benzyl alcohol or methyl parabens; antioxidants such as ascorbic acid or sodium bisulfite; chelating agents such as ethylenediaminetetraacetic acid; buffers such as acetates, citrates or phosphates and agents for the adjustment of tonicity such as sodium chloride or dextrose. pH can be adjusted with acids or bases, such as hydrochloric acid or sodium hydroxide. The parenteral preparation can be enclosed in ampoules, disposable syringes or multiple dose vials made of glass or plastic.

[0786] Pharmaceutical compositions suitable for injectable use include sterile aqueous solutions (where water soluble) or dispersions and sterile powders for the extemporaneous preparation of sterile injectable solutions or dispersion. For intravenous administration, suitable carriers include physiological saline, bacteriostatic water, Cremophor EL™ (BASF, Parsippany, N.J.) or phosphate buffered saline (PBS). In all cases, the composition must be sterile and should be fluid to the extent that easy syringeability exists. It must be stable under the conditions of manufacture and storage and must be preserved against the contaminating action of microorganisms such as bacteria and fungi. The carrier can be a solvent or dispersion medium containing, for example, water, ethanol, polyol (for example, glycerol, propylene glycol, and liquid polyetheylene glycol, and the like), and suitable mixtures thereof. The proper fluidity can be maintained, for example, by the use of a coating such as lecithin, by the maintenance of the required particle size in the case of dispersion and by the use of surfactants. Prevention of the action of microorganisms can be achieved by various antibacterial and antifungal agents, for example, parabens, chlorobutanol, phenol, ascorbic acid, thimerosal, and the like. In many cases, it will be preferable to include isotonic agents, for example, sugars, polyalcohols such as manitol, sorbitol, sodium chloride in the composition. Prolonged absorption of the injectable compositions can be brought about by including in the composition an agent which delays absorption, for example, aluminum monostearate and gelatin.

[0787] Sterile injectable solutions can be prepared by incorporating the active compound (e.g., a fragment of an IC23927 protein or an anti-IC23927 antibody) in the required amount in an appropriate solvent with one or a combination of ingredients enumerated above, as required, followed by filtered sterilization. Generally, dispersions are prepared by incorporating the active compound into a sterile vehicle which contains a basic dispersion medium and the required other ingredients from those enumerated above. In the case of sterile powders for the preparation of sterile injectable solutions, the preferred methods of preparation are vacuum drying and freeze-drying which yields a powder of the active ingredient plus any additional desired ingredient from a previously sterile-filtered solution thereof.

[0788] Oral compositions generally include an inert diluent or an edible carrier. They can be enclosed in gelatin capsules or compressed into tablets. For the purpose of oral therapeutic administration, the active compound can be incorporated with excipients and used in the form of tablets, troches, or capsules, oral compositions can also be prepared using a fluid carrier for use as a mouthwash, wherein the compound in the fluid carrier is applied orally and swished and expectorated or swallowed. Pharmaceutically compatible binding agents, and/or adjuvant materials can be included as part of the composition. The tablets, pills, capsules, troches and the like can contain any of the following ingredients, or compounds of a similar nature: a binder such as microcrystalline cellulose, gum tragacanth or gelatin; an excipient such as starch or lactose, a disintegrating agent such as alginic acid, Primogel, or corn starch; a lubricant such as magnesium stearate or Sterotes; a glidant such as colloidal silicon dioxide; a sweetening agent such as sucrose or saccharin; or a flavoring agent such as peppermint, methyl salicylate, or orange flavoring.

[0789] For administration by inhalation, the compounds are delivered in the form of an aerosol spray from pressured container or dispenser which contains a suitable propellant, e.g., a gas such as carbon dioxide, or a nebulizer.

[0790] Systemic administration can also be by transmucosal or transdermal means. For transmucosal or transdermal administration, penetrants appropriate to the barrier to be permeated are used in the formulation. Such penetrants are generally known in the art, and include, for example, for transmucosal administration, detergents, bile salts, and fusidic acid derivatives. Transmucosal administration can be accomplished through the use of nasal sprays or suppositories. For transdermal administration, the active compounds are formulated into ointments, salves, gels, or creams as generally known in the art.

[0791] The compounds can also be prepared in the form of suppositories (e.g, with conventional suppository bases such as cocoa butter and other glycerides) or retention enemas for rectal delivery.

[0792] In one embodiment, the active compounds are prepared with carriers that will protect the compound against rapid elimination from the body, such as a controlled release formulation, including implants and microencapsulated delivery systems. Biodegradable, biocompatible polymers can be used, such as ethylene vinyl acetate, polyanhydrides, polyglycolic acid, collagen, polyorthoesters, and polylactic acid. Methods for preparation of such formulations will be apparent to those skilled in the art. The materials can also be obtained commercially from Alza Corporation and Nova Pharmaceuticals, Inc. Liposomal suspensions (including liposomes targeted to infected cells with monoclonal antibodies to viral antigens) can also be used as pharmaceutically acceptable carriers. These can be prepared according to methods known to those skilled in the art, for example, as described in U.S. Pat. No. 4,522,811.

[0793] It is especially advantageous to formulate oral or parenteral compositions in dosage unit form for ease of administration and uniformity of dosage. Dosage unit form as used herein refers to physically discrete units suited as unitary dosages for the subject to be treated; each unit containing a predetermined quantity of active compound calculated to produce the desired therapeutic effect in association with the required pharmaceutical carrier. The specification for the dosage unit forms of the invention are dictated by and directly dependent on the unique characteristics of the active compound and the particular therapeutic effect to be achieved, and the limitations inherent in the art of compounding such an active compound for the treatment of individuals.

[0794] Toxicity and therapeutic efficacy of such compounds can be determined by standard pharmaceutical procedures in cell cultures or experimental animals, e.g., for determining the LD50 (the dose lethal to 50% of the population) and the ED50 (the dose therapeutically effective in 50% of the population). The dose ratio between toxic and therapeutic effects is the therapeutic index and it can be expressed as the ratio LD50/ED50. Compounds which exhibit large therapeutic indices are preferred. While compounds that exhibit toxic side effects may be used, care should be taken to design a delivery system that targets such compounds to the site of affected tissue in order to minimize potential damage to uninfected cells and, thereby, reduce side effects.

[0795] The data obtained from the cell culture assays and animal studies can be used in formulating a range of dosage for use in humans. The dosage of such compounds lies preferably within a range of circulating concentrations that include the ED50 with little or no toxicity. The dosage may vary within this range depending upon the dosage form employed and the route of administration utilized. For any compound used in the method of the invention, the therapeutically effective dose can be estimated initially from cell culture assays. A dose may be formulated in animal models to achieve a circulating plasma concentration range that includes the IC50 (i.e., the concentration of the test compound which achieves a half-maximal inhibition of symptoms) as determined in cell culture. Such information can be used to more accurately determine useful doses in humans. Levels in plasma may be measured, for example, by high performance liquid chromatography.

[0796] As defined herein, a therapeutically effective amount of protein or polypeptide (i.e., an effective dosage) ranges from about 0.001 to 30 mg/kg body weight, preferably about 0.01 to 25 mg/kg body weight, more preferably about 0.1 to 20 mg/kg body weight, and even more preferably about 1 to 10 mg/kg, 2 to 9 mg/kg, 3 to 8 mg/kg, 4 to 7 mg/kg, or 5 to 6 mg/kg body weight. The skilled artisan will appreciate that certain factors may influence the dosage required to effectively treat a subject, including but not limited to the severity of the disease or disorder, previous treatments, the general health and/or age of the subject, and other diseases present. Moreover, treatment of a subject with a therapeutically effective amount of a protein, polypeptide, or antibody can include a single treatment or, preferably, can include a series of treatments.

[0797] In a preferred example, a subject is treated with antibody, protein, or polypeptide in the range of between about 0.1 to 20 mg/kg body weight, one time per week for between about 1 to 10 weeks, preferably between 2 to 8 weeks, more preferably between about 3 to 7 weeks, and even more preferably for about 4, 5, or 6 weeks. It will also be appreciated that the effective dosage of antibody, protein, or polypeptide used for treatment may increase or decrease over the course of a particular treatment. Changes in dosage may result and become apparent from the results of diagnostic assays as described herein.

[0798] The present invention encompasses agents which modulate expression or activity. An agent may, for example, be a small molecule. For example, such small molecules include, but are not limited to, peptides, peptidomimetics, amino acids, amino acid analogs, polynucleotides, polynucleotide analogs, nucleotides, nucleotide analogs, organic or inorganic compounds (i.e., including heteroorganic and organometallic compounds) having a molecular weight less than about 10,000 grams per mole, organic or inorganic compounds having a molecular weight less than about 5,000 grams per mole, organic or inorganic compounds having a molecular weight less than about 1,000 grams per mole, organic or inorganic compounds having a molecular weight less than about 500 grams per mole, and salts, esters, and other pharmaceutically acceptable forms of such compounds. It is understood that appropriate doses of small molecule agents depends upon a number of factors within the ken of the ordinarily skilled physician, veterinarian, or researcher. The dose(s) of the small molecule will vary, for example, depending upon the identity, size, and condition of the subject or sample being treated, further depending upon the route by which the composition is to be administered, if applicable, and the effect which the practitioner desires the small molecule to have upon the nucleic acid or polypeptide of the invention.

[0799] Exemplary doses include milligram or microgram amounts of the small molecule per kilogram of subject or sample weight (e.g., about 1 microgram per kilogram to about 500 milligrams per kilogram, about 100 micrograms per kilogram to about 5 milligrams per kilogram, or about 1 microgram per kilogram to about 50 micrograms per kilogram. It is furthermore understood that appropriate doses of a small molecule depend upon the potency of the small molecule with respect to the expression or activity to be modulated. Such appropriate doses may be determined using the assays described herein. When one or more of these small molecules is to be administered to an animal (e.g., a human) in order to modulate expression or activity of a polypeptide or nucleic acid of the invention, a physician, veterinarian, or researcher may, for example, prescribe a relatively low dose at first, subsequently increasing the dose until an appropriate response is obtained. In addition, it is understood that the specific dose level for any particular animal subject will depend upon a variety of factors including the activity of the specific compound employed, the age, body weight, general health, gender, and diet of the subject, the time of administration, the route of administration, the rate of excretion, any drug combination, and the degree of expression or activity to be modulated.

[0800] Further, an antibody (or fragment thereof) may be conjugated to a therapeutic moiety such as a cytotoxin, a therapeutic agent or a radioactive metal ion. A cytotoxin or cytotoxic agent includes any agent that is detrimental to cells. Examples include taxol, cytochalasin B, gramicidin D, ethidium bromide, emetine, mitomycin, etoposide, tenoposide, vincristine, vinblastine, colchicin, doxorubicin, daunorubicin, dihydroxy anthracin dione, mitoxantrone, mithramycin, actinomycin D, 1-dehydrotestosterone, glucocorticoids, procaine, tetracaine, lidocaine, propranolol, and puromycin and analogs or homologs thereof. Therapeutic agents include, but are not limited to, antimetabolites (e.g., methotrexate, 6-mercaptopurine, 6-thioguanine, cytarabine, 5-fluorouracil decarbazine), alkylating agents (e.g., mechlorethamine, thioepa chlorambucil, melphalan, carmustine (BSNU) and lomustine (CCNU), cyclothosphamide, busulfan, dibromomannitol, streptozotocin, mitomycin C, and cis-dichlorodiamine platinum (II) (DDP) cisplatin), anthracyclines (e.g., daunorubicin (formerly daunomycin) and doxorubicin), antibiotics (e.g., dactinomycin (formerly actinomycin), bleomycin, mithramycin, and anthramycin (AMC)), and anti-mitotic agents (e.g., vincristine and vinblastine).

[0801] The conjugates of the invention can be used for modifying a given biological response, the drug moiety is not to be construed as limited to classical chemical therapeutic agents. For example, the drug moiety may be a protein or polypeptide possessing a desired biological activity. Such proteins may include, for example, a toxin such as abrin, ricin A, pseudomonas exotoxin, or diphtheria toxin; a protein such as tumor necrosis factor, alpha-interferon, beta-interferon, nerve growth factor, platelet derived growth factor, tissue plasminogen activator; or, biological response modifiers such as, for example, lymphokines, interleukin-1 (“IL-1”), interleukin-2 (“IL-2”), interleukin-6 (“IL-6”), granulocyte macrophage colony stimulating factor (“GM-CSF”), granulocyte colony stimulating factor (“G-CSF”), or other growth factors.

[0802] Techniques for conjugating such therapeutic moiety to antibodies are well known, see, e.g.. Arnon et al., “Monoclonal Antibodies For Immunotargeting Of Drugs In Cancer Therapy”, in Monoclonal Antibodies And Cancer Therapy, Reisfeld et al. (eds.), pp. 243-56 (Alan R. Liss, Inc. 1985); Hellstrom et al., “Antibodies For Drug Delivery”, in Controlled Drug Delivery (2nd Ed.), Robinson et al. (eds.), pp. 623-53 (Marcel Dekker, Inc. 1987); Thorpe, “Antibody Carriers Of Cytotoxic Agents In Cancer Therapy: A Review”, in Monoclonal Antibodies '84: Biological And Clinical Applications, Pinchera et al. (eds.), pp. 475-506 (1985); “Analysis, Results, And Future Prospective Of The Therapeutic Use Of Radiolabeled Antibody In Cancer Therapy”, in Monoclonal Antibodies For Cancer Detection And Therapy, Baldwin et al. (eds.), pp. 303-16 (Academic Press 1985), and Thorpe et al., “The Preparation And Cytotoxic Properties Of Antibody-Toxin Conjugates”, Immunol. Rev., 62:119-58 (1982). Alternatively, an antibody can be conjugated to a second antibody to form an antibody heteroconjugate as described by Segal in U.S. Pat. No. 4,676,980.

[0803] The nucleic acid molecules of the invention can be inserted into vectors and used as gene therapy vectors. Gene therapy vectors can be delivered to a subject by, for example, intravenous injection, local administration (see U.S. Pat. No. 5,328,470) or by stereotactic injection (see e.g., Chen et al. (1994) Proc. Natl. Acad. Sci. USA 91:3054-3057). The pharmaceutical preparation of the gene therapy vector can include the gene therapy vector in an acceptable diluent, or can comprise a slow release matrix in which the gene delivery vehicle is imbedded. Alternatively, where the complete gene delivery vector can be produced intact from recombinant cells, e.g., retroviral vectors, the pharmaceutical preparation can include one or more cells which produce the gene delivery system.

[0804] The pharmaceutical compositions can be included in a container, pack, or dispenser together with instructions for administration.

[0805] V. Uses and Methods of the Invention

[0806] The nucleic acid molecules, proteins, protein homologues, modulators and antibodies described herein can be used in one or more of the following methods: a) screening assays; b) predictive medicine (e.g., diagnostic assays, prognostic assays, monitoring clinical trials, and pharmacogenetics); and c) methods of treatment (e.g., therapeutic and prophylactic). As described herein, an IC23927 protein of the invention has one or more of the following activities: (1) modulation of membrane excitability, (2) regulation of intracellular ion concentration, (3) modulation of membrane polarization (e.g., membrane polarization and/or depolarization), (4) regulation of action potential, (5) regulation of cellular signal transduction, (6) regulation of neurotransmitter release (e.g., from neuronal cells), (7) modulation of synaptic transmission, (8) regulation of neuronal excitability and/or plasticity, (9) regulation of muscle contraction, (10) regulation of cell activation (e.g., T cell activation), (11) regulation of cellular proliferation, growth, migration and/or differentiation, and/or (12) modulation of pain and/or pain signaling.

[0807] The isolated nucleic acid molecules of the invention can be used, for example, to express IC23927 protein (e.g., via a recombinant expression vector in a host cell in gene therapy applications), to detect IC23927 mRNA (e.g., in a biological sample) or a genetic alteration in an IC23927 gene, and to modulate IC23927 activity, as described further below. The IC23927 proteins can be used to treat disorders characterized by insufficient or excessive production of an IC23927 ligand or production of IC23927 inhibitors. Moreover, modulation of IC23927 activity has particular application in treating pain and or pain disorders. Modulation of IC23927 activity includes, but is not limited to, increasing or enhancing the activity of IC23927 (e.g., increasing or enhancing IC23927 signaling), decreasing or inhibiting the activity of IC23927 (e.g., decreasing or inhibiting IC23927 signaling), regulating IC23927 cellular localization, trafficking and/or desensitization of 52871. In addition, the IC23927 proteins can be used to screen for naturally occurring IC23927 ligands, to screen for drugs or compounds which modulate IC23927 activity, as well as to treat disorders characterized by insufficient or excessive production of IC23927 protein or production of IC23927 protein forms which have decreased, aberrant or unwanted activity compared to IC23927 wild type protein (e.g., CNS disorders (such as neurodegenerative disorders), pain disorders, or disorders of cellular growth, differentiation, or migration. Moreover, the anti-IC23927 antibodies of the invention can be used to detect and isolate IC23927 proteins, to regulate the bioavailability of IC23927 proteins, and modulate IC23927 activity.

[0808] A. Screening Assays:

[0809] The invention provides a method (also referred to herein as a “screening assay”) for identifying modulators, i.e., candidate or test compounds or agents (e.g., peptides, peptidomimetics, small molecules or other drugs) which bind to IC23927 proteins, have a stimulatory or inhibitory effect on, for example, IC23927 expression or IC23927 activity.

[0810] In one embodiment, the invention provides assays for screening candidate or test compounds which are ligands of an IC23927 protein or polypeptide or biologically active portion thereof. In another embodiment, the invention provides assays for screening candidate or test compounds which bind to or modulate the activity of an IC23927 protein or polypeptide or biologically active portion thereof. The test compounds of the present invention can be obtained using any of the numerous approaches in combinatorial library methods known in the art, including: biological libraries; spatially addressable parallel solid phase or solution phase libraries; synthetic library methods requiring deconvolution; the ‘one-bead one-compound’ library method; and synthetic library methods using affinity chromatography selection. The biological library approach is limited to peptide libraries, while the other four approaches are applicable to peptide, non-peptide oligomer or small molecule libraries of compounds (Lam, K. S. (1997) Anticancer Drug Des. 12:145).

[0811] Examples of methods for the synthesis of molecular libraries can be found in the art, for example in: DeWitt et al. (1993) Proc. Natl. Acad. Sci. U.S.A. 90:6909; Erb et al. (1994) Proc. Natl. Acad. Sci. USA 91:11422; Zuckermann et al. (1994). J. Med. Chem. 37:2678; Cho et al. (1993) Science 261:1303; Carrell et al. (1994) Angew. Chem. Int. Ed. Engl. 33:2059; Carell et al. (1994) Angew. Chem. Int. Ed. Engl. 33:2061; and in Gallop et al. (1994) J. Med. Chem. 37:1233.

[0812] Libraries of compounds may be presented in solution (e.g., Houghten (1992) Biotechniques 13:412-421), or on beads (Lam (1991) Nature 354:82-84), chips (Fodor (1993) Nature 364:555-556), bacteria (Ladner U.S. Pat. No. 5,223,409), spores (Ladner U.S. Pat. No. '409), plasmids (Cull et al. (1992) Proc. Natl. Acad. Sci. USA 89:1865-1869) or on phage (Scott and Smith (1990) Science 249:386-390); (Devlin (1990) Science 249:404-406); (Cwirla et al. (1990) Proc. Natl. Acad. Sci. 87:6378-6382); (Felici (1991) J. Mol. Biol. 222:301-310); (Ladner supra.).

[0813] In one embodiment, an assay is a cell-based assay in which a cell which expresses an IC23927 protein or biologically active portion thereof is contacted with a test compound and the ability of the test compound to modulate IC23927 activity is determined. Determining the ability of the test compound to modulate IC23927 activity can be accomplished by monitoring, for example, intracellular calcium, IP3, or diacylglycerol concentration, or phosphorylation profile of intracellular proteins. Preferably, Determining the ability of the test compound to modulate IC23927 activity can be accomplished by monitoring intracellular ligand (e.g., ion) concentration). The cell, for example, can be of mammalian origin, e.g., a neuronal cell, or a liver cell.

[0814] The ability of the test compound to modulate IC23927 binding to a ligand or target molecule can also be determined. Determining the ability of the test compound to modulate IC23927 binding to a ligand or target molecule can be accomplished, for example, by coupling the IC23927 ligand or target molecule with a radioisotope or enzymatic label such that binding of the IC23927 ligand or target molecule to IC23927 can be determined by detecting the labeled IC23927 ligand or target molecule in a complex. Alternatively, IC23927 could be coupled with a radioisotope or enzymatic label to monitor the ability of a test compound to modulate IC23927 binding to an IC23927 ligand or target molecule in a complex. Determining the ability of the test compound to bind IC23927 can be accomplished, for example, by coupling the compound with a radioisotope or enzymatic label such that binding of the compound to IC23927 can be determined by detecting the labeled IC23927 compound in a complex. For example, compounds (e.g., IC23927 target molecules) can be labeled with ¹²⁵I, ³⁵S, ¹⁴C, or ³H, either directly or indirectly, and the radioisotope detected by direct counting of radioemission or by scintillation counting. Alternatively, compounds can be enzymatically labeled with, for example, horseradish peroxidase, alkaline phosphatase, or luciferase, and the enzymatic label detected by determination of conversion of an appropriate substrate to product.

[0815] It is also within the scope of this invention to determine the ability of a compound (e.g., an IC23927 ligand or target molecule) to interact with IC23927 without the labeling of any of the interactants. For example, a microphysiometer can be used to detect the interaction of a compound with IC23927 without the labeling of either the compound or the IC23927. McConnell, H. M. et al. (1992) Science 257:1906-1912. As used herein, a “microphysiometer” (e.g., Cytosensor) is an analytical instrument that measures the rate at which a cell acidifies its environment using a light-addressable potentiometric sensor (LAPS). Changes in this acidification rate can be used as an indicator of the interaction between a compound and IC23927.

[0816] In another embodiment, an assay is a cell-based assay comprising contacting a cell expressing an IC23927 target molecule (e.g., an IC23927 ligand) with a test compound and determining the ability of the test compound to modulate (e.g., stimulate or inhibit) the activity of the IC23927 target molecule. Determining the ability of the test compound to modulate the activity of an IC23927 target molecule can be accomplished, for example, by determining the ability of the IC23927 protein to bind to or interact with the IC23927 target molecule or, alternatively, by determining the intracellular concentration of the target molecule or ligand.

[0817] Determining the ability of the IC23927 protein, or a biologically active fragment thereof, to bind to, interact with or transport an IC23927 target molecule (e.g., a ligand) can be accomplished by one of the methods described above for determining direct binding. In a preferred embodiment, determining the ability of the IC23927 protein to bind to, interact with or transport an IC23927 target molecule can be accomplished by determining the intracellular concentration or a secondary activity of the target molecule. For example, the activity of the target molecule can be determined by detecting induction of a cellular second messenger of the target (i.e., intracellular Ca²⁺, diacylglycerol, IP₃, and the like), detecting catalytic/enzymatic activity of the target using an appropriate substrate, detecting the induction of a reporter gene (comprising a target-responsive regulatory element operatively linked to a nucleic acid encoding a detectable marker, e.g., luciferase), or detecting a target-regulated cellular response.

[0818] In yet another embodiment, an assay of the present invention is a cell-free assay in which an IC23927 protein or biologically active portion thereof is contacted with a test compound and the ability of the test compound to bind to the IC23927 protein or biologically active portion thereof is determined. Preferred biologically active portions of the IC23927 proteins to be used in assays of the present invention include fragments which participate in interactions with non-IC23927 molecules, e.g., fragments with high surface probability scores (see, for example, FIG. 17). Binding of the test compound to the IC23927 protein can be determined either directly or indirectly as described above. In a preferred embodiment, the assay includes contacting the IC23927 protein or biologically active portion thereof with a known compound which binds IC23927 to form an assay mixture, contacting the assay mixture with a test compound, and determining the ability of the test compound to interact with an IC23927 protein, wherein determining the ability of the test compound to interact with an IC23927 protein comprises determining the ability of the test compound to preferentially bind to IC23927 or biologically active portion thereof as compared to the known compound.

[0819] In another embodiment, the assay is a cell-free assay in which an IC23927 protein or biologically active portion thereof is contacted with a test compound and the ability of the test compound to modulate (e.g., stimulate or inhibit) the activity of the IC23927 protein or biologically active portion thereof is determined. Determining the ability of the test compound to modulate the activity of an IC23927 protein can be accomplished, for example, by determining the ability of the IC23927 protein to bind to an IC23927 target molecule by one of the methods described above for determining direct binding. Determining the ability of the IC23927 protein to bind to an IC23927 target molecule can also be accomplished using a technology such as real-time Biomolecular Interaction Analysis (BIA). Sjolander, S. and Urbaniczky, C. (1991) Anal. Chem. 63:2338-2345 and Szabo et al. (1995) Curr. Opin. Struct. Biol. 5:699-705. As used herein, “BIA” is a technology for studying biospecific interactions in real time, without labeling any of the interactants (e.g., BIAcore). Changes in the optical phenomenon of surface plasmon resonance (SPR) can be used as an indication of real-time reactions between biological molecules.

[0820] In an alternative embodiment, determining the ability of the test compound to modulate the activity of an IC23927 protein can be accomplished by determining the ability of the IC23927 protein to further modulate the activity of a downstream effector of an IC23927 target molecule. For example, the activity of the effector molecule on an appropriate target can be determined or the binding of the effector to an appropriate target can be determined as previously described.

[0821] In yet another embodiment, the cell-free assay involves contacting an IC23927 protein or biologically active portion thereof with a known compound which binds the IC23927 protein to form an assay mixture, contacting the assay mixture with a test compound, and determining the ability of the test compound to interact with the IC23927 protein, wherein determining the ability of the test compound to interact with the IC23927 protein comprises determining the ability of the IC23927 protein to preferentially bind to or modulate the activity of an IC23927 target molecule.

[0822] In more than one embodiment of the above assay methods of the present invention, it may be desirable to immobilize either IC23927 or its target molecule to facilitate separation of complexed from uncomplexed forms of one or both of the proteins, as well as to accommodate automation of the assay. Binding of a test compound to an IC23927 protein, or interaction of an IC23927 protein with a target molecule in the presence and absence of a candidate compound, can be accomplished in any vessel suitable for containing the reactants. Examples of such vessels include microtitre plates, test tubes, and micro-centrifuge tubes. In one embodiment, a fusion protein can be provided which adds a domain that allows one or both of the proteins to be bound to a matrix. For example, glutathione-S-transferase/IC23927 fusion proteins or glutathione-S-transferase/target fusion proteins can be adsorbed onto glutathione sepharose beads (Sigma Chemical, St. Louis, Mo.) or glutathione derivatized microtitre plates, which are then combined with the test compound or the test compound and either the non-adsorbed target protein or IC23927 protein, and the mixture incubated under conditions conducive to complex formation (e.g., at physiological conditions for salt and pH). Following incubation, the beads or microtitre plate wells are washed to remove any unbound components, the matrix immobilized in the case of beads, complex determined either directly or indirectly, for example, as described above. Alternatively, the complexes can be dissociated from the matrix, and the level of IC23927 binding or activity determined using standard techniques.

[0823] Other techniques for immobilizing proteins on matrices can also be used in the screening assays of the invention. For example, either an IC23927 protein or an IC23927 target molecule can be immobilized utilizing conjugation of biotin and streptavidin. Biotinylated IC23927 protein or target molecules can be prepared from biotin-NHS (N-hydroxy-succinimide) using techniques known in the art (e.g., biotinylation kit, Pierce Chemicals, Rockford, Ill.), and immobilized in the wells of streptavidin-coated 96 well plates (Pierce Chemical). Alternatively, antibodies reactive with IC23927 protein or target molecules but which do not interfere with binding of the IC23927 protein to its target molecule can be derivatized to the wells of the plate, and unbound target or IC23927 protein trapped in the wells by antibody conjugation. Methods for detecting such complexes, in addition to those described above for the GST-immobilized complexes, include immunodetection of complexes using antibodies reactive with the IC23927 protein or target molecule, as well as enzyme-linked assays which rely on detecting an enzymatic activity associated with the IC23927 protein or target molecule.

[0824] In another embodiment, modulators of IC23927 expression are identified in a method wherein a cell is contacted with a candidate compound and the expression of IC23927 mRNA or protein in the cell is determined. The level of expression of IC23927 mRNA or protein in the presence of the candidate compound is compared to the level of expression of IC23927 mRNA or protein in the absence of the candidate compound. The candidate compound can then be identified as a modulator of IC23927 expression based on this comparison. For example, when expression of IC23927 mRNA or protein is greater (statistically significantly greater) in the presence of the candidate compound than in its absence, the candidate compound is identified as a stimulator of IC23927 mRNA or protein expression. Alternatively, when expression of IC23927 mRNA or protein is less (statistically significantly less) in the presence of the candidate compound than in its absence, the candidate compound is identified as an inhibitor of IC23927 mRNA or protein expression. The level of IC23927 mRNA or protein expression in the cells can be determined by methods described herein for detecting IC23927 mRNA or protein.

[0825] In yet another aspect of the invention, the IC23927 proteins can be used as “bait proteins” in a two-hybrid assay or three-hybrid assay (see, e.g., U.S. Pat. No. 5,283,317; Zervos et al. (1993) Cell 72:223-232; Madura et al. (1993) J. Biol. Chem. 268:12046-12054; Bartel et al. (1993) Biotechniques 14:920-924; Iwabuchi et al. (1993) Oncogene 8:1693-1696; and Brent WO94/10300), to identify other proteins, which bind to or interact with IC23927 (“IC23927-binding proteins” or “IC23927-bp”) and are involved in IC23927 activity. Such IC23927-binding proteins are also likely to be involved in the propagation of signals by the IC23927 proteins or IC23927 targets as, for example, downstream elements of an IC23927-mediated signaling pathway. Alternatively, such IC23927-binding proteins are likely to be IC23927 inhibitors.

[0826] The two-hybrid system is based on the modular nature of most transcription factors, which consist of separable DNA-binding and activation domains. Briefly, the assay utilizes two different DNA constructs. In one construct, the gene that codes for an IC23927 protein is fused to a gene encoding the DNA binding domain of a known transcription factor (e.g., GAL-4). In the other construct, a DNA sequence, from a library of DNA sequences, that encodes an unidentified protein (“prey” or “sample”) is fused to a gene that codes for the activation domain of the known transcription factor. If the “bait” and the “prey” proteins are able to interact, in vivo, forming an IC23927-dependent complex, the DNA-binding and activation domains of the transcription factor are brought into close proximity. This proximity allows transcription of a reporter gene (e.g., LacZ) which is operably linked to a transcriptional regulatory site responsive to the transcription factor. Expression of the reporter gene can be detected and cell colonies containing the functional transcription factor can be isolated and used to obtain the cloned gene which encodes the protein which interacts with the IC23927 protein.

[0827] In another aspect, the invention pertains to a combination of two or more of the assays described herein. For example, a modulating agent can be identified using a cell-based or a cell free assay, and the ability of the agent to modulate the activity of an IC23927 protein can be confirmed in vivo, e.g., in an animal such as an animal model for cellular transformation and/or tumorigenesis.

[0828] This invention further pertains to novel agents identified by the above-described screening assays. Accordingly, it is within the scope of this invention to further use an agent identified as described herein in an appropriate animal model. For example, an agent identified as described herein (e.g., an IC23927 modulating agent, an antisense IC23927 nucleic acid molecule, an IC23927-specific antibody, or an IC23927-binding partner) can be used in an animal model to determine the efficacy, toxicity, or side effects of treatment with such an agent. Alternatively, an agent identified as described herein can be used in an animal model to determine the mechanism of action of such an agent. Models for studying pain in vivo include rat models of neuropathic pain caused by methods such as intraperitoneal administration of Taxol (Authier et al. (2000) Brain Res. 887:239-249), chronic constriction injury (CCI), partial sciatic nerve transection (Linenlaub and Sommer (2000) Pain 89:97-106), transection of the tibial and sural nerves (Lee et al. (2000) Neurosci. Lett. 291:29-32), the spared nerve injury model (Decosterd and Woolf (2000) Pain 87:149-158), cuffing the sciatic nerve (Pitcher and Henry (2000) Eur. J. Neurosci. 12:2006-2020), unilateral tight ligation (Esser and Sawynok (2000) Eur. J. Pharmacol. 399:131-139), L5 spinal nerve ligation (Honroe et al. (2000) Neurosci. 98:585-598), and photochemically induced ischemic nerve injury (Hao et al. (2000) Exp. Neurol. 163:231 -238); rat models of nociceptive pain caused by methods such as the Chung Method, the Bennett Method, and intraperitoneal administration of complete Freund's adjuvant (CFA) (Abdi et al. (2000) Anesth. Analg. 91:955-959); rat models of post-incisional pain caused by incising the skin and fascia of a hind paw (Olivera and Prado (2000) Braz. J. Med. Biol. Res. 33:957-960); rat models of cancer pain caused by methods such as injecting osteolytic sarcoma cells into the femur (Honroe et al. (2000) Neurosci. 98:585-598); and rat models of visceral pain caused by methods such as intraperitoneal administration of cyclophosphamide.

[0829] Various methods of determining an animal's response to pain are known in the art. Examples of such methods include, but are not limited to brief intense exposure to a focused heat source, administration of a noxious chemical subcutaneously, the tail flick test, the hot plate test, the formalin test, Von Frey threshold, and testing for stress-induced analgesia (et al., by restraint, foot shock, and/or cold water swim) (Crawley (2000) What's Wrong With My Mouse? Wiley-Liss pp. 72-75).

[0830] Furthermore, this invention pertains to uses of novel agents identified by the above-described screening assays for treatments as described herein.

[0831] B. Detection Assays

[0832] Portions or fragments of the cDNA sequences identified herein (and the corresponding complete gene sequences) can be used in numerous ways as polynucleotide reagents. For example, these sequences can be used to: (i) map their respective genes on a chromosome; and, thus, locate gene regions associated with genetic disease; (ii) identify an individual from a minute biological sample (tissue typing); and (iii) aid in forensic identification of a biological sample. These applications are described in the subsections below.

[0833] 1. Chromosome Mapping

[0834] Once the sequence (or a portion of the sequence) of a gene has been isolated, this sequence can be used to map the location of the gene on a chromosome. This process is called chromosome mapping. Accordingly, portions or fragments of the IC23927 nucleotide sequences, described herein, can be used to map the location of the IC23927 genes on a chromosome. The mapping of the IC23927 sequences to chromosomes is an important first step in correlating these sequences with genes associated with disease.

[0835] Briefly, IC23927 genes can be mapped to chromosomes by preparing PCR primers (preferably 15-25 bp in length) from the IC23927 nucleotide sequences. Computer analysis of the IC23927 sequences can be used to predict primers that do not span more than one exon in the genomic DNA, thus complicating the amplification process. These primers can then be used for PCR screening of somatic cell hybrids containing individual human chromosomes. Only those hybrids containing the human gene corresponding to the IC23927 sequences will yield an amplified fragment.

[0836] Somatic cell hybrids are prepared by fusing somatic cells from different mammals (e.g., human and mouse cells). As hybrids of human and mouse cells grow and divide, they gradually lose human chromosomes in random order, but retain the mouse chromosomes. By using media in which mouse cells cannot grow, because they lack a particular enzyme, but human cells can, the one human chromosome that contains the gene encoding the needed enzyme, will be retained. By using various media, panels of hybrid cell lines can be established. Each cell line in a panel contains either a single human chromosome or a small number of human chromosomes, and a full set of mouse chromosomes, allowing easy mapping of individual genes to specific human chromosomes. (D'Eustachio P. et al. (1983) Science 220:919-924). Somatic cell hybrids containing only fragments of human chromosomes can also be produced by using human chromosomes with translocations and deletions.

[0837] PCR mapping of somatic cell hybrids is a rapid procedure for assigning a particular sequence to a particular chromosome. Three or more sequences can be assigned per day using a single thermal cycler. Using the IC23927 nucleotide sequences to design oligonucleotide primers, sublocalization can be achieved with panels of fragments from specific chromosomes. Other mapping strategies which can similarly be used to map an IC23927 sequence to its chromosome include in situ hybridization (described in Fan, Y. et al. (1990) Proc. Natl. Acad. Sci. USA, 87:6223-27), pre-screening with labeled flow-sorted chromosomes, and pre-selection by hybridization to chromosome specific cDNA libraries.

[0838] Fluorescence in situ hybridization (FISH) of a DNA sequence to a metaphase chromosomal spread can further be used to provide a precise chromosomal location in one step. Chromosome spreads can be made using cells whose division has been blocked in metaphase by a chemical such as colcemid that disrupts the mitotic spindle. The chromosomes can be treated briefly with trypsin, and then stained with Giemsa. A pattern of light and dark bands develops on each chromosome, so that the chromosomes can be identified individually. The FISH technique can be used with a DNA sequence as short as 500 or 600 bases. However, clones larger than 1,000 bases have a higher likelihood of binding to a unique chromosomal location with sufficient signal intensity for simple detection. Preferably 1,000 bases, and more preferably 2,000 bases will suffice to get good results at a reasonable amount of time. For a review of this technique, see Verma et al., Human Chromosomes: A Manual of Basic Techniques (Pergamon Press, New York 1988).

[0839] Reagents for chromosome mapping can be used individually to mark a single chromosome or a single site on that chromosome, or panels of reagents can be used for marking multiple sites and/or multiple chromosomes. Reagents corresponding to noncoding regions of the genes actually are preferred for mapping purposes. Coding sequences are more likely to be conserved within gene families, thus increasing the chance of cross hybridizations during chromosomal mapping.

[0840] Once a sequence has been mapped to a precise chromosomal location, the physical position of the sequence on the chromosome can be correlated with genetic map data. (Such data are found, for example, in V. McKusick, Mendelian Inheritance in Man, available on-line through Johns Hopkins University Welch Medical Library). The relationship between a gene and a disease, mapped to the same chromosomal region, can then be identified through linkage analysis (co-inheritance of physically adjacent genes), described in, for example, Egeland, J. et al. (1987) Nature, 325:783-787.

[0841] Moreover, differences in the DNA sequences between individuals affected and unaffected with a disease associated with the IC23927 gene, can be determined. If a mutation is observed in some or all of the affected individuals but not in any unaffected individuals, then the mutation is likely to be the causative agent of the particular disease. Comparison of affected and unaffected individuals generally involves first looking for structural alterations in the chromosomes, such as deletions or translocations that are visible from chromosome spreads or detectable using PCR based on that DNA sequence. Ultimately, complete sequencing of genes from several individuals can be performed to confirm the presence of a mutation and to distinguish mutations from polymorphisms.

[0842] 2. Tissue Typing

[0843] The IC23927 sequences of the present invention can also be used to identify individuals from minute biological samples. The United States military, for example, is considering the use of restriction fragment length polymorphism (RFLP) for identification of its personnel. In this technique, an individual's genomic DNA is digested with one or more restriction enzymes, and probed on a Southern blot to yield unique bands for identification. This method does not suffer from the current limitations of “Dog Tags” which can be lost, switched, or stolen, making positive identification difficult. The sequences of the present invention are useful as additional DNA markers for RFLP (described in U.S. Pat. No. 5,272,057).

[0844] Furthermore, the sequences of the present invention can be used to provide an alternative technique which determines the actual base-by-base DNA sequence of selected portions of an individual's genome. Thus, the IC23927 nucleotide sequences described herein can be used to prepare two PCR primers from the 5′ and 3′ ends of the sequences. These primers can then be used to amplify an individual's DNA and subsequently sequence it.

[0845] Panels of corresponding DNA sequences from individuals, prepared in this manner, can provide unique individual identifications, as each individual will have a unique set of such DNA sequences due to allelic differences. The sequences of the present invention can be used to obtain such identification sequences from individuals and from tissue. The IC23927 nucleotide sequences of the invention uniquely represent portions of the human genome. Allelic variation occurs to some degree in the coding regions of these sequences, and to a greater degree in the noncoding regions. It is estimated that allelic variation between individual humans occurs with a frequency of about once per each 500 bases. Each of the sequences described herein can, to some degree, be used as a standard against which DNA from an individual can be compared for identification purposes. Because greater numbers of polymorphisms occur in the noncoding regions, fewer sequences are necessary to differentiate individuals. The noncoding sequences of SEQ ID NO:21 can comfortably provide positive individual identification with a panel of perhaps 10 to 1,000 primers which each yield a noncoding amplified sequence of 100 bases. If predicted coding sequences, such as those in SEQ ID NO:23 are used, a more appropriate number of primers for positive individual identification would be 500-2,000.

[0846] If a panel of reagents from IC23927 nucleotide sequences described herein is used to generate a unique identification database for an individual, those same reagents can later be used to identify tissue from that individual. Using the unique identification database, positive identification of the individual, living or dead, can be made from extremely small tissue samples.

[0847] 3. Use of IC23927 Sequences in Forensic Biology

[0848] DNA-based identification techniques can also be used in forensic biology. Forensic biology is a scientific field employing genetic typing of biological evidence found at a crime scene as a means for positively identifying, for example, a perpetrator of a crime. To make such an identification, PCR technology can be used to amplify DNA sequences taken from very small biological samples such as tissues, e.g., hair or skin, or body fluids, e.g., blood, saliva, or semen found at a crime scene. The amplified sequence can then be compared to a standard, thereby allowing identification of the origin of the biological sample.

[0849] The sequences of the present invention can be used to provide polynucleotide reagents, e.g., PCR primers, targeted to specific loci in the human genome, which can enhance the reliability of DNA-based forensic identifications by, for example, providing another “identification marker” (i.e. another DNA sequence that is unique to a particular individual). As mentioned above, actual base sequence information can be used for identification as an accurate alternative to patterns formed by restriction enzyme generated fragments. Sequences targeted to noncoding regions of SEQ ID NO:21 are particularly appropriate for this use as greater numbers of polymorphisms occur in the noncoding regions, making it easier to differentiate individuals using this technique. Examples of polynucleotide reagents include the IC23927 nucleotide sequences or portions thereof, e.g., fragments derived from the noncoding regions of SEQ ID NO:21 having a length of at least 20 bases, preferably at least 30 bases.

[0850] The IC23927 nucleotide sequences described herein can further be used to provide polynucleotide reagents, e.g., labeled or labelable probes which can be used in, for example, an in situ hybridization technique, to identify a specific tissue, e.g., brain tissue. This can be very useful in cases where a forensic pathologist is presented with a tissue of unknown origin. Panels of such IC23927 probes can be used to identify tissue by species and/or by organ type.

[0851] In a similar fashion, these reagents, e.g., IC23927 primers or probes can be used to screen tissue culture for contamination (i.e. screen for the presence of a mixture of different types of cells in a culture).

[0852] C. Predictive Medicine:

[0853] The present invention also pertains to the field of predictive medicine in which diagnostic assays, prognostic assays, and monitoring clinical trials are used for prognostic (predictive) purposes to thereby treat an individual prophylactically. Accordingly, one aspect of the present invention relates to diagnostic assays for determining IC23927 protein and/or nucleic acid expression as well as IC23927 activity, in the context of a biological sample (e.g., blood, serum, cells, tissue) to thereby determine whether an individual is afflicted with a disease or disorder, or is at risk of developing a disorder, associated with aberrant or unwanted IC23927 expression or activity. The invention also provides for prognostic (or predictive) assays for determining whether an individual is at risk of developing a disorder associated with IC23927 protein, nucleic acid expression or activity. For example, mutations in an IC23927 gene can be assayed in a biological sample. Such assays can be used for prognostic or predictive purpose to thereby prophylactically treat an individual prior to the onset of a disorder characterized by or associated with IC23927 protein, nucleic acid expression or activity.

[0854] Another aspect of the invention pertains to monitoring the influence of agents (e.g., drugs, compounds) on the expression or activity of IC23927 in clinical trials.

[0855] These and other agents are described in further detail in the following sections.

[0856] 1. Diagnostic Assays

[0857] An exemplary method for detecting the presence or absence of IC23927 protein or nucleic acid in a biological sample involves obtaining a biological sample from a test subject and contacting the biological sample with a compound or an agent capable of detecting IC23927 protein or nucleic acid (e.g., mRNA, or genomic DNA) that encodes IC23927 protein such that the presence of IC23927 protein or nucleic acid is detected in the biological sample. A preferred agent for detecting IC23927 mRNA or genomic DNA is a labeled nucleic acid probe capable of hybridizing to IC23927 mRNA or genomic DNA. The nucleic acid probe can be, for example, the IC23927 nucleic acid set forth in SEQ ID NO:21 or 23, or the DNA insert of the plasmid deposited with ATCC as Accession Number ______, or a portion thereof, such as an oligonucleotide of at least 15, 30, 50, 100, 250 or 500 nucleotides in length and sufficient to specifically hybridize under stringent conditions to IC23927 mRNA or genomic DNA. Other suitable probes for use in the diagnostic assays of the invention are described herein.

[0858] A preferred agent for detecting IC23927 protein is an antibody capable of binding to IC23927 protein, preferably an antibody with a detectable label. Antibodies can be polyclonal, or more preferably, monoclonal. An intact antibody, or a fragment thereof (e.g., Fab or F(ab′)₂) can be used. The term “labeled”, with regard to the probe or antibody, is intended to encompass direct labeling of the probe or antibody by coupling (i.e., physically linking) a detectable substance to the probe or antibody, as well as indirect labeling of the probe or antibody by reactivity with another reagent that is directly labeled. Examples of indirect labeling include detection of a primary antibody using a fluorescently labeled secondary antibody and end-labeling of a DNA probe with biotin such that it can be detected with fluorescently labeled streptavidin. The term “biological sample” is intended to include tissues, cells and biological fluids isolated from a subject, as well as tissues, cells and fluids present within a subject. That is, the detection method of the invention can be used to detect IC23927 mRNA, protein, or genomic DNA in a biological sample in vitro as well as in vivo. For example, in vitro techniques for detection of IC23927 mRNA include Northern hybridizations and in situ hybridizations. In vitro techniques for detection of IC23927 protein include enzyme linked immunosorbent assays (ELISAs), Western blots, immunoprecipitations and immunofluorescence. In vitro techniques for detection of IC23927 genomic DNA include Southern hybridizations. Furthermore, in vivo techniques for detection of IC23927 protein include introducing into a subject a labeled anti-IC23927 antibody. For example, the antibody can be labeled with a radioactive marker whose presence and location in a subject can be detected by standard imaging techniques.

[0859] In one embodiment, the biological sample contains protein molecules from the test subject. Alternatively, the biological sample can contain mRNA molecules from the test subject or genomic DNA molecules from the test subject. A preferred biological sample is a serum sample isolated by conventional means from a subject.

[0860] In another embodiment, the methods further involve obtaining a control biological sample from a control subject, contacting the control sample with a compound or agent capable of detecting IC23927 protein, mRNA, or genomic DNA, such that the presence of IC23927 protein, mRNA or genomic DNA is detected in the biological sample, and comparing the presence of IC23927 protein, mRNA or genomic DNA in the control sample with the presence of IC23927 protein, mRNA or genomic DNA in the test sample.

[0861] The invention also encompasses kits for detecting the presence of IC23927 in a biological sample. For example, the kit can comprise a labeled compound or agent capable of detecting IC23927 protein or mRNA in a biological sample; means for determining the amount of IC23927 in the sample; and means for comparing the amount of IC23927 in the sample with a standard. The compound or agent can be packaged in a suitable container. The kit can further comprise instructions for using the kit to detect IC23927 protein or nucleic acid.

[0862] 2. Prognostic Assays

[0863] The diagnostic methods described herein can furthermore be utilized to identify subjects having or at risk of developing a disease or disorder associated with aberrant or unwanted IC23927 expression or activity. As used herein, the term “aberrant” includes an IC23927 expression or activity which deviates from the wild type IC23927 expression or activity. Aberrant expression or activity includes increased or decreased expression or activity, as well as expression or activity which does not follow the wild type developmental pattern of expression or the subcellular pattern of expression. For example, aberrant IC23927 expression or activity is intended to include the cases in which a mutation in the IC23927 gene causes the IC23927 gene to be under-expressed or over-expressed and situations in which such mutations result in a non-functional IC23927 protein or a protein which does not function in a wild-type fashion, e.g., a protein which does not interact with an IC23927 target, e.g., a non-ion channel subunit or ligand, or one which interacts with a non-IC23927 target molecule, e.g. a non-ion channel subunit or ligand. As used herein, the term “unwanted” includes an unwanted phenomenon involved in a biological response, such as cellular proliferation. For example, the term unwanted includes an IC23927 expression or activity which is undesirable in a subject.

[0864] The assays described herein, such as the preceding diagnostic assays or the following assays, can be utilized to identify a subject having or at risk of developing a disorder associated with a misregulation in IC23927 protein activity or nucleic acid expression, such as a CNS disorder (e.g., a neurodegenerative disorder, a pain disorder, or a cellular proliferation, growth, differentiation, or migration disorder). Alternatively, the prognostic assays can be utilized to identify a subject having or at risk for developing a disorder associated with a misregulation in IC23927 protein activity or nucleic acid expression, such as a CNS disorder, a pain disorder, or a cellular proliferation, growth, differentiation, or migration disorder. Thus, the present invention provides a method for identifying a disease or disorder associated with aberrant or unwanted IC23927 expression or activity in which a test sample is obtained from a subject and IC23927 protein or nucleic acid (e.g., mRNA or genomic DNA) is detected, wherein the presence of IC23927 protein or nucleic acid is diagnostic for a subject having or at risk of developing a disease or disorder associated with aberrant or unwanted IC23927 expression or activity. As used herein, a “test sample” refers to a biological sample obtained from a subject of interest. For example, a test sample can be a biological fluid (e.g., serum), cell sample, or tissue.

[0865] Furthermore, the prognostic assays described herein can be used to determine whether a subject can be administered an agent (e.g., an agonist, antagonist, peptidomimetic, protein, peptide, nucleic acid, small molecule, or other drug candidate) to treat a disease or disorder associated with aberrant or unwanted IC23927 expression or activity. For example, such methods can be used to determine whether a subject can be effectively treated with an agent for a CNS disorder, pain disorder, or a cellular proliferation, growth, differentiation, or migration disorder. Thus, the present invention provides methods for determining whether a subject can be effectively treated with an agent for a disorder associated with aberrant or unwanted IC23927 expression or activity in which a test sample is obtained and IC23927 protein or nucleic acid expression or activity is detected (e.g., wherein the abundance of IC23927 protein or nucleic acid expression or activity is diagnostic for a subject that can be administered the agent to treat a disorder associated with aberrant or unwanted IC23927 expression or activity).

[0866] The methods of the invention can also be used to detect genetic alterations in an IC23927 gene, thereby determining if a subject with the altered gene is at risk for a disorder characterized by misregulation in IC23927 protein activity or nucleic acid expression, such as a CNS disorder, pain disorder, or a disorder of cellular growth, differentiation, or migration. In preferred embodiments, the methods include detecting, in a sample of cells from the subject, the presence or absence of a genetic alteration characterized by at least one of an alteration affecting the integrity of a gene encoding an IC23927-protein, or the mis-expression of the IC23927 gene. For example, such genetic alterations can be detected by ascertaining the existence of at least one of 1) a deletion of one or more nucleotides from an IC23927 gene; 2) an addition of one or more nucleotides to an IC23927 gene; 3) a substitution of one or more nucleotides of an IC23927 gene, 4) a chromosomal rearrangement of an IC23927 gene; 5) an alteration in the level of a messenger RNA transcript of an IC23927 gene, 6) aberrant modification of an IC23927 gene, such as of the methylation pattern of the genomic DNA, 7) the presence of a non-wild type splicing pattern of a messenger RNA transcript of an IC23927 gene, 8) a non-wild type level of an IC23927-protein, 9) allelic loss of an IC23927 gene, and 10) inappropriate post-translational modification of an IC23927-protein. As described herein, there are a large number of assays known in the art which can be used for detecting alterations in an IC23927 gene. A preferred biological sample is a tissue or serum sample isolated by conventional means from a subject.

[0867] In certain embodiments, detection of the alteration involves the use of a probe/primer in a polymerase chain reaction (PCR) (see, e.g., U.S. Pat. Nos. 4,683,195 and 4,683,202), such as anchor PCR or RACE PCR, or, alternatively, in a ligation chain reaction (LCR) (see, e.g., Landegran et al. (1988) Science 241:1077-1080; and Nakazawa et al. (1994) Proc. Natl. Acad. Sci. USA 91:360-364), the latter of which can be particularly useful for detecting point mutations in the IC23927-gene (see Abravaya et al. (1995) Nucleic Acids Res. 23:675-682). This method can include the steps of collecting a sample of cells from a subject, isolating nucleic acid (e.g., genomic, mRNA or both) from the cells of the sample, contacting the nucleic acid sample with one or more primers which specifically hybridize to an IC23927 gene under conditions such that hybridization and amplification of the IC23927-gene (if present) occurs, and detecting the presence or absence of an amplification product, or detecting the size of the amplification product and comparing the length to a control sample. It is anticipated that PCR and/or LCR may be desirable to use as a preliminary amplification step in conjunction with any of the techniques used for detecting mutations described herein.

[0868] Alternative amplification methods include: self sustained sequence replication (Guatelli, J. C. et al., (1990) Proc. Natl. Acad. Sci. USA 87:1874-1878), transcriptional amplification system (Kwoh, D. Y. et al., (1989) Proc. Natl. Acad. Sci. USA 86:1173-1177), Q-Beta Replicase (Lizardi, P. M. et al. (1988) Bio-Technology 6:1197), or any other nucleic acid amplification method, followed by the detection of the amplified molecules using techniques well known to those of skill in the art. These detection schemes are especially useful for the detection of nucleic acid molecules if such molecules are present in very low numbers.

[0869] In an alternative embodiment, mutations in an IC23927 gene from a sample cell can be identified by alterations in restriction enzyme cleavage patterns. For example, sample and control DNA is isolated, amplified (optionally), digested with one or more restriction endonucleases, and fragment length sizes are determined by gel electrophoresis and compared. Differences in fragment length sizes between sample and control DNA indicates mutations in the sample DNA. Moreover, the use of sequence specific ribozymes (see, for example, U.S. Pat. No. 5,498,531) can be used to score for the presence of specific mutations by development or loss of a ribozyme cleavage site.

[0870] In other embodiments, genetic mutations in IC23927 can be identified by hybridizing a sample and control nucleic acids, e.g., DNA or RNA, to high density arrays containing hundreds or thousands of oligonucleotides probes (Cronin, M. T. et al. (1996) Human Mutation 7: 244-255; Kozal, M. J. et al. (1996) Nature Medicine 2: 753-759). For example, genetic mutations in IC23927 can be identified in two dimensional arrays containing light-generated DNA probes as described in Cronin, M. T. et al. supra. Briefly, a first hybridization array of probes can be used to scan through long stretches of DNA in a sample and control to identify base changes between the sequences by making linear arrays of sequential overlapping probes. This step allows the identification of point mutations. This step is followed by a second hybridization array that allows the characterization of specific mutations by using smaller, specialized probe arrays complementary to all variants or mutations detected. Each mutation array is composed of parallel probe sets, one complementary to the wild-type gene and the other complementary to the mutant gene.

[0871] In yet another embodiment, any of a variety of sequencing reactions known in the art can be used to directly sequence the IC23927 gene and detect mutations by comparing the sequence of the sample IC23927 with the corresponding wild-type (control) sequence. Examples of sequencing reactions include those based on techniques developed by Maxam and Gilbert ((1977) Proc. Natl. Acad. Sci. USA 74:560) or Sanger ((1977) Proc. Natl. Acad. Sci. USA 74:5463). It is also contemplated that any of a variety of automated sequencing procedures can be utilized when performing the diagnostic assays ((1995) Biotechniques 19:448), including sequencing by mass spectrometry (see, e.g., PCT International Publication No. WO 94/16101; Cohen et al. (1996) Adv. Chromatogr. 36:127-162; and Griffin et al. (1993) Appl. Biochem. Biotechnol. 38:147-159).

[0872] Other methods for detecting mutations in the IC23927 gene include methods in which protection from cleavage agents is used to detect mismatched bases in RNA/RNA or RNA/DNA heteroduplexes (Myers et al. (1985) Science 230:1242). In general, the art technique of “mismatch cleavage” starts by providing heteroduplexes of formed by hybridizing (labeled) RNA or DNA containing the wild-type IC23927 sequence with potentially mutant RNA or DNA obtained from a tissue sample. The double-stranded duplexes are treated with an agent which cleaves single-stranded regions of the duplex such as which will exist due to basepair mismatches between the control and sample strands. For instance, RNA/DNA duplexes can be treated with RNase and DNA/DNA hybrids treated with S1 nuclease to enzymatically digesting the mismatched regions. In other embodiments, either DNA/DNA or RNA/DNA duplexes can be treated with hydroxylamine or osmium tetroxide and with piperidine in order to digest mismatched regions. After digestion of the mismatched regions, the resulting material is then separated by size on denaturing polyacrylamide gels to determine the site of mutation. See, for example, Cotton et al. (1988) Proc. Natl. Acad. Sci. USA 85:4397; Saleeba et al. (1992) Methods Enzymol. 217:286-295. In a preferred embodiment, the control DNA or RNA can be labeled for detection.

[0873] In still another embodiment, the mismatch cleavage reaction employs one or more proteins that recognize mismatched base pairs in double-stranded DNA (so called “DNA mismatch repair” enzymes) in defined systems for detecting and mapping point mutations in IC23927 cDNAs obtained from samples of cells. For example, the mutY enzyme of E. coli cleaves A at G/A mismatches and the thymidine DNA glycosylase from HeLa cells cleaves T at G/T mismatches (Hsu et al. (1994) Carcinogenesis 15:1657-1662). According to an exemplary embodiment, a probe based on an IC23927 sequence, e.g., a wild-type IC23927 sequence, is hybridized to a cDNA or other DNA product from a test cell(s). The duplex is treated with a DNA mismatch repair enzyme, and the cleavage products, if any, can be detected from electrophoresis protocols or the like. See, for example, U.S. Pat. No. 5,459,039.

[0874] In other embodiments, alterations in electrophoretic mobility will be used to identify mutations in IC23927 genes. For example, single strand conformation polymorphism (SSCP) may be used to detect differences in electrophoretic mobility between mutant and wild type nucleic acids (Orita et al. (1989) Proc Natl. Acad. Sci USA: 86:2766, see also Cotton (1993) Mutat. Res. 285:125-144; and Hayashi (1992) Genet. Anal. Tech. Appl. 9:73-79). Single-stranded DNA fragments of sample and control IC23927 nucleic acids will be denatured and allowed to renature. The secondary structure of single-stranded nucleic acids varies according to sequence, the resulting alteration in electrophoretic mobility enables the detection of even a single base change. The DNA fragments may be labeled or detected with labeled probes. The sensitivity of the assay may be enhanced by using RNA (rather than DNA), in which the secondary structure is more sensitive to a change in sequence. In a preferred embodiment, the subject method utilizes heteroduplex analysis to separate double stranded heteroduplex molecules on the basis of changes in electrophoretic mobility (Keen et al. (1991) Trends Genet 7:5).

[0875] In yet another embodiment the movement of mutant or wild-type fragments in polyacrylamide gels containing a gradient of denaturant is assayed using denaturing gradient gel electrophoresis (DGGE) (Myers et al. (1985) Nature 313:495). When DGGE is used as the method of analysis, DNA will be modified to insure that it does not completely denature, for example by adding a GC clamp of approximately 40 bp of high-melting GC-rich DNA by PCR. In a further embodiment, a temperature gradient is used in place of a denaturing gradient to identify differences in the mobility of control and sample DNA (Rosenbaum and Reissner (1987) Biophys Chem 265:12753).

[0876] Examples of other techniques for detecting point mutations include, but are not limited to, selective oligonucleotide hybridization, selective amplification, or selective primer extension. For example, oligonucleotide primers may be prepared in which the known mutation is placed centrally and then hybridized to target DNA under conditions which permit hybridization only if a perfect match is found (Saiki et al. (1986) Nature 324:163); Saiki et al. (1989) Proc. Natl Acad. Sci USA 86:6230). Such allele specific oligonucleotides are hybridized to PCR amplified target DNA or a number of different mutations when the oligonucleotides are attached to the hybridizing membrane and hybridized with labeled target DNA.

[0877] Alternatively, allele specific amplification technology which depends on selective PCR amplification may be used in conjunction with the instant invention. Oligonucleotides used as primers for specific amplification may carry the mutation of interest in the center of the molecule (so that amplification depends on differential hybridization) (Gibbs et al. (1989) Nucleic Acids Res. 17:2437-2448) or at the extreme 3′ end of one primer where, under appropriate conditions, mismatch can prevent, or reduce polymerase extension (Prossner (1993) Tibtech 11:238). In addition it may be desirable to introduce a novel restriction site in the region of the mutation to create cleavage-based detection (Gasparini et al. (1992) Mol. Cell Probes 6:1). It is anticipated that in certain embodiments amplification may also be performed using Taq ligase for amplification (Barany (1991) Proc. Natl. Acad. Sci USA 88:189). In such cases, ligation will occur only if there is a perfect match at the 3′ end of the 5′ sequence making it possible to detect the presence of a known mutation at a specific site by looking for the presence or absence of amplification.

[0878] The methods described herein may be performed, for example, by utilizing pre-packaged diagnostic kits comprising at least one probe nucleic acid or antibody reagent described herein, which may be conveniently used, e.g., in clinical settings to diagnose patients exhibiting symptoms or family history of a disease or illness involving an IC23927 gene.

[0879] Furthermore, any cell type or tissue in which IC23927 is expressed may be utilized in the prognostic assays described herein.

[0880] 3. Monitoring of Effects During Clinical Trials

[0881] Monitoring the influence of agents (e.g., drugs) on the expression or activity of an IC23927 protein (e.g., the modulation of membrane excitability) can be applied not only in basic drug screening, but also in clinical trials. For example, the effectiveness of an agent determined by a screening assay as described herein to increase IC23927 gene expression, protein levels, or upregulate IC23927 activity, can be monitored in clinical trials of subjects exhibiting decreased IC23927 gene expression, protein levels, or downregulated IC23927 activity. Alternatively, the effectiveness of an agent determined by a screening assay to decrease IC23927 gene expression, protein levels, or downregulate IC23927 activity, can be monitored in clinical trials of subjects exhibiting increased IC23927 gene expression, protein levels, or upregulated IC23927 activity. In such clinical trials, the expression or activity of an IC23927 gene, and preferably, other genes that have been implicated in, for example, an IC23927-associated disorder can be used as a “read out” or markers of the phenotype of a particular cell.

[0882] For example, and not by way of limitation, genes, including IC23927, that are modulated in cells by treatment with an agent (e.g., compound, drug or small molecule) which modulates IC23927 activity (e.g., identified in a screening assay as described herein) can be identified. Thus, to study the effect of agents on IC23927-associated disorders (e.g., disorders characterized by deregulated signaling, e.g., pain disorders, or membrane excitation), for example, in a clinical trial, cells can be isolated and RNA prepared and analyzed for the levels of expression of IC23927 and other genes implicated in the IC23927-associated disorder, respectively. The levels of gene expression (e.g., a gene expression pattern) can be quantified by northern blot analysis or RT-PCR, as described herein, or alternatively by measuring the amount of protein produced, by one of the methods as described herein, or by measuring the levels of activity of IC23927 or other genes. In this way, the gene expression pattern can serve as a marker, indicative of the physiological response of the cells to the agent. Accordingly, this response state may be determined before, and at various points during treatment of the individual with the agent.

[0883] In a preferred embodiment, the present invention provides a method for monitoring the effectiveness of treatment of a subject with an agent (e.g., an agonist, antagonist, peptidomimetic, protein, peptide, nucleic acid, small molecule, or other drug candidate identified by the screening assays described herein) including the steps of (i) obtaining a pre-administration sample from a subject prior to administration of the agent; (ii) detecting the level of expression of an IC23927 protein, mRNA, or genomic DNA in the preadministration sample; (iii) obtaining one or more post-administration samples from the subject; (iv) detecting the level of expression or activity of the IC23927 protein, mRNA, or genomic DNA in the post-administration samples; (v) comparing the level of expression or activity of the IC23927 protein, mRNA, or genomic DNA in the pre-administration sample with the IC23927 protein, mRNA, or genomic DNA in the post administration sample or samples; and (vi) altering the administration of the agent to the subject accordingly. For example, increased administration of the agent may be desirable to increase the expression or activity of IC23927 to higher levels than detected, i.e., to increase the effectiveness of the agent. Alternatively, decreased administration of the agent may be desirable to decrease expression or activity of IC23927 to lower levels than detected, i.e. to decrease the effectiveness of the agent. According to such an embodiment, IC23927 expression or activity may be used as an indicator of the effectiveness of an agent, even in the absence of an observable phenotypic response.

[0884] D. Methods of Treatment:

[0885] The present invention provides for both prophylactic and therapeutic methods of treating a subject at risk of (or susceptible to) a disorder or having a disorder associated with aberrant or unwanted IC23927 expression or activity, e.g. a CNS disorder, pain disorder, or a cellular proliferation, growth, differentiation, or migration disorder. “Treatment”, or “treating” as used herein, is defined as the application or administration of a therapeutic agent to a patient, or application or administration of a therapeutic agent to an isolated tissue or cell line from a patient, who has a disease or disorder, a symptom of disease or disorder or a predisposition toward a disease or disorder, with the purpose to cure, heal, alleviate, relieve, alter, remedy, ameliorate, improve or affect the disease or disorder, the symptoms of the disease or disorder, or the predisposition toward disease. A therapeutic agent includes, but is not limited to, small molecules, peptides, antibodies, ribozymes and antisense oligonucleotides. With regards to both prophylactic and therapeutic methods of treatment, such treatments may be specifically tailored or modified, based on knowledge obtained from the field of pharmacogenomics. “Pharmacogenomics”, as used herein, refers to the application of genomics technologies such as gene sequencing, statistical genetics, and gene expression analysis to drugs in clinical development and on the market. More specifically, the term refers the study of how a patient's genes determine his or her response to a drug (e.g., a patient's “drug response phenotype”, or “drug response genotype”). Thus, another aspect of the invention provides methods for tailoring an individual's prophylactic or therapeutic treatment with either the IC23927 molecules of the present invention or IC23927 modulators according to that individual's drug response genotype. Pharmacogenomics allows a clinician or physician to target prophylactic or therapeutic treatments to patients who will most benefit from the treatment and to avoid treatment of patients who will experience toxic drug-related side effects.

[0886] 1. Prophylactic Methods

[0887] In one aspect, the invention provides a method for preventing in a subject, a disease or condition associated with an aberrant or unwanted IC23927 expression or activity, by administering to the subject an IC23927 or an agent which modulates IC23927 expression or at least one IC23927 activity. Subjects at risk for a disease which is caused or contributed to by aberrant or unwanted IC23927 expression or activity can be identified by, for example, any or a combination of diagnostic or prognostic assays as described herein. Administration of a prophylactic agent can occur prior to the manifestation of symptoms characteristic of the IC23927 aberrancy, such that a disease or disorder is prevented or, alternatively, delayed in its progression. Depending on the type of IC23927 aberrancy, for example, an IC23927, IC23927 agonist or IC23927 antagonist agent can be used for treating the subject. The appropriate agent can be determined based on screening assays described herein.

[0888] 2. Therapeutic Methods

[0889] Another aspect of the invention pertains to methods of modulating IC23927 expression or activity for therapeutic purposes. Accordingly, in an exemplary embodiment, the modulatory method of the invention involves contacting a cell with an IC23927 or agent that modulates one or more of the activities of IC23927 protein activity associated with the cell. An agent that modulates IC23927 protein activity can be an agent as described herein, such as a nucleic acid or a protein, a naturally-occurring target molecule of an IC23927 protein (e.g., an IC23927 ligand or binding partner), an IC23927 antibody, an IC23927 agonist or antagonist, a peptidomimetic of an IC23927 agonist or antagonist, or other small molecule. In one embodiment, the agent stimulates one or more IC23927 activities. Examples of such stimulatory agents include active IC23927 protein and a nucleic acid molecule encoding IC23927 that has been introduced into the cell. In another embodiment, the agent inhibits one or more IC23927 activities. Examples of such inhibitory agents include antisense IC23927 nucleic acid molecules, anti-IC23927 antibodies, and IC23927 inhibitors. These modulatory methods can be performed in vitro (e.g., by culturing the cell with the agent) or, alternatively, in vivo (e.g., by administering the agent to a subject). As such, the present invention provides methods of treating an individual afflicted with a disease or disorder characterized by aberrant or unwanted expression or activity of an IC23927 protein or nucleic acid molecule. In one embodiment, the method involves administering an agent (e.g., an agent identified by a screening assay described herein), or combination of agents that modulates (e.g., upregulates or downregulates) IC23927 expression or activity. In another embodiment, the method involves administering an IC23927 protein or nucleic acid molecule as therapy to compensate for reduced, aberrant, or unwanted IC23927 expression or activity.

[0890] Stimulation of IC23927 activity is desirable in situations in which IC23927 is abnormally downregulated and/or in which increased IC23927 activity is likely to have a beneficial effect. Likewise, inhibition of IC23927 activity is desirable in situations in which IC23927 is abnormally upregulated and/or in which decreased IC23927 activity is likely to have a beneficial effect.

[0891] 3. Pharmacogenomics

[0892] The IC23927 molecules of the present invention, as well as agents, or modulators which have a stimulatory or inhibitory effect on IC23927 activity (e.g., IC23927 gene expression) as identified by a screening assay described herein can be administered to individuals to treat (prophylactically or therapeutically) IC23927-associated disorders (e.g., proliferative disorders) associated with aberrant or unwanted IC23927 activity. In conjunction with such treatment, pharmacogenomics (i.e., the study of the relationship between an individual's genotype and that individual's response to a foreign compound or drug) may be considered. Differences in metabolism of therapeutics can lead to severe toxicity or therapeutic failure by altering the relation between dose and blood concentration of the pharmacologically active drug. Thus, a physician or clinician may consider applying knowledge obtained in relevant pharmacogenomics studies in determining whether to administer an IC23927 molecule or IC23927 modulator as well as tailoring the dosage and/or therapeutic regimen of treatment with an IC23927 molecule or IC23927 modulator.

[0893] Pharmacogenomics deals with clinically significant hereditary variations in the response to drugs due to altered drug disposition and abnormal action in affected persons. See, for example, Eichelbaum, M. et al. (1996) Clin. Exp. Pharmacol. Physiol. 23(10-11): 983-985 and Linder, M. W. et al. (1997) Clin. Chem. 43(2):254-266. In general, two types of pharmacogenetic conditions can be differentiated. Genetic conditions transmitted as a single factor altering the way drugs act on the body (altered drug action) or genetic conditions transmitted as single factors altering the way the body acts on drugs (altered drug metabolism). These pharmacogenetic conditions can occur either as rare genetic defects or as naturally-occurring polymorphisms. For example, glucose-6-phosphate dehydrogenase deficiency (G6PD) is a common inherited enzymopathy in which the main clinical complication is haemolysis after ingestion of oxidant drugs (anti-malarials, sulfonamides, analgesics, nitrofurans) and consumption of fava beans.

[0894] One pharmacogenomics approach to identifying genes that predict drug response, known as “a genome-wide association”, relies primarily on a high-resolution map of the human genome consisting of already known gene-related markers (e.g., a “bi-allelic” gene marker map which consists of 60,000-100,000 polymorphic or variable sites on the human genome, each of which has two variants.) Such a high-resolution genetic map can be compared to a map of the genome of each of a statistically significant number of patients taking part in a Phase II/III drug trial to identify markers associated with a particular observed drug response or side effect. Alternatively, such a high resolution map can be generated from a combination of some ten-million known single nucleotide polymorphisms (SNPs) in the human genome. As used herein, a “SNP” is a common alteration that occurs in a single nucleotide base in a stretch of DNA. For example, a SNP may occur once per every 1000 bases of DNA. A SNP may be involved in a disease process, however, the vast majority may not be disease-associated. Given a genetic map based on the occurrence of such SNPs, individuals can be grouped into genetic categories depending on a particular pattern of SNPs in their individual genome. In such a manner, treatment regimens can be tailored to groups of genetically similar individuals, taking into account traits that may be common among such genetically similar individuals.

[0895] Alternatively, a method termed the “candidate gene approach”, can be utilized to identify genes that predict drug response. According to this method, if a gene that encodes a drugs target is known (e.g., an IC23927 protein of the present invention), all common variants of that gene can be fairly easily identified in the population and it can be determined if having one version of the gene versus another is associated with a particular drug response.

[0896] As an illustrative embodiment, the activity of drug metabolizing enzymes is a major determinant of both the intensity and duration of drug action. The discovery of genetic polymorphisms of drug metabolizing enzymes (e.g., N-acetyltransferase 2 (NAT 2) and cytochrome P450 enzymes CYP2D6 and CYP2C19) has provided an explanation as to why some patients do not obtain the expected drug effects or show exaggerated drug response and serious toxicity after taking the standard and safe dose of a drug. These polymorphisms are expressed in two phenotypes in the population, the extensive metabolizer (EM) and poor metabolizer (PM). The prevalence of PM is different among different populations. For example, the gene coding for CYP2D6 is highly polymorphic and several mutations have been identified in PM, which all lead to the absence of functional CYP2D6. Poor metabolizers of CYP2D6 and CYP2C19 quite frequently experience exaggerated drug response and side effects when they receive standard doses. If a metabolite is the active therapeutic moiety, PM show no therapeutic response, as demonstrated for the analgesic effect of codeine mediated by its CYP2D6-formed metabolite morphine. The other extreme are the so called ultra-rapid metabolizers who do not respond to standard doses. Recently, the molecular basis of ultra-rapid metabolism has been identified to be due to CYP2D6 gene amplification.

[0897] Alternatively, a method termed the “gene expression profiling”, can be utilized to identify genes that predict drug response. For example, the gene expression of an animal dosed with a drug (e.g., an IC23927 molecule or IC23927 modulator of the present invention) can give an indication whether gene pathways related to toxicity have been turned on.

[0898] Information generated from more than one of the above pharmacogenomics approaches can be used to determine appropriate dosage and treatment regimens for prophylactic or therapeutic treatment an individual. This knowledge, when applied to dosing or drug selection, can avoid adverse reactions or therapeutic failure and thus enhance therapeutic or prophylactic efficiency when treating a subject with an IC23927 molecule or IC23927 modulator, such as a modulator identified by one of the exemplary screening assays described herein.

[0899] 4. Use of IC23927 Molecules as Surrogate Markers

[0900] The IC23927 molecules of the invention are also useful as markers of disorders or disease states, as markers for precursors of disease states, as markers for predisposition of disease states, as markers of drug activity, or as markers of the pharmacogenomic profile of a subject. Using the methods described herein, the presence, absence and/or quantity of the IC23927 molecules of the invention may be detected, and may be correlated with one or more biological states in vivo. For example, the IC23927 molecules of the invention may serve as surrogate markers for one or more disorders or disease states or for conditions leading up to disease states. As used herein, a “surrogate marker” is an objective biochemical marker which correlates with the absence or presence of a disease or disorder, or with the progression of a disease or disorder (e.g., with the presence or absence of a tumor). The presence or quantity of such markers is independent of the disease. Therefore, these markers may serve to indicate whether a particular course of treatment is effective in lessening a disease state or disorder. Surrogate markers are of particular use when the presence or extent of a disease state or disorder is difficult to assess through standard methodologies (e.g., early stage tumors), or when an assessment of disease progression is desired before a potentially dangerous clinical endpoint is reached (e.g., an assessment of cardiovascular disease may be made using cholesterol levels as a surrogate marker, and an analysis of HIV infection may be made using HIV RNA levels as a surrogate marker, well in advance of the undesirable clinical outcomes of myocardial infarction or fully-developed AIDS). Examples of the use of surrogate markers in the art include: Koomen et al. (2000) J. Mass. Spectrom. 35: 258-264; and James (1994) AIDS Treatment News Archive 209.

[0901] The IC23927 molecules of the invention are also useful as pharmacodynamic markers. As used herein, a “pharmacodynamic marker” is an objective biochemical marker which correlates specifically with drug effects. The presence or quantity of a pharmacodynamic marker is not related to the disease state or disorder for which the drug is being administered; therefore, the presence or quantity of the marker is indicative of the presence or activity of the drug in a subject. For example, a pharmacodynamic marker may be indicative of the concentration of the drug in a biological tissue, in that the marker is either expressed or transcribed or not expressed or transcribed in that tissue in relationship to the level of the drug. In this fashion, the distribution or uptake of the drug may be monitored by the pharmacodynamic marker. Similarly, the presence or quantity of the pharmacodynamic marker may be related to the presence or quantity of the metabolic product of a drug, such that the presence or quantity of the marker is indicative of the relative breakdown rate of the drug in vivo. Pharmacodynamic markers are of particular use in increasing the sensitivity of detection of drug effects, particularly when the drug is administered in low doses. Since even a small amount of a drug may be sufficient to activate multiple rounds of marker (e.g., a IC23927 marker) transcription or expression, the amplified marker may be in a quantity which is more readily detectable than the drug itself. Also, the marker may be more easily detected due to the nature of the marker itself; for example, using the methods described herein, anti-IC23927 antibodies may be employed in an immune-based detection system for a IC23927 protein marker, or IC23927-specific radiolabeled probes may be used to detect a IC23927 mRNA marker. Furthermore, the use of a pharmacodynamic marker may offer mechanism-based prediction of risk due to drug treatment beyond the range of possible direct observations. Examples of the use of pharmacodynamic markers in the art include: Matsuda et al. U.S. Pat. No. 6,033,862; Hattis et al. (1991) Env. Health Perspect. 90: 229-238; Schentag (1999) Am. J. Health-Syst. Pharm. 56 Suppl. 3: S21-S24; and Nicolau (1999) Am, J. Health-Syst. Pharm. 56 Suppl. 3: S16-S20.

[0902] The IC23927 molecules of the invention are also useful as pharmacogenomic markers. As used herein, a “pharmacogenomic marker” is an objective biochemical marker which correlates with a specific clinical drug response or susceptibility in a subject (see, e.g., McLeod et al. (1999) Eur. J. Cancer 35(12): 1650-1652). The presence or quantity of the pharmacogenomic marker is related to the predicted response of the subject to a specific drug or class of drugs prior to administration of the drug. By assessing the presence or quantity of one or more pharmacogenomic markers in a subject, a drug therapy which is most appropriate for the subject, or which is predicted to have a greater degree of success, may be selected. For example, based on the presence or quantity of RNA, or protein (e.g., IC23927 protein or RNA) for specific tumor markers in a subject, a drug or course of treatment may be selected that is optimized for the treatment of the specific tumor likely to be present in the subject. Similarly, the presence or absence of a specific sequence mutation in IC23927 DNA may correlate IC23927 drug response. The use of pharmacogenomic markers therefore permits the application of the most appropriate treatment for each subject without having to administer the therapy.

[0903] VI. Electronic Apparatus Readable Media and Arrays

[0904] Electronic apparatus readable media comprising IC23927 sequence information is also provided. As used herein, “IC23927 sequence information” refers to any nucleotide and/or amino acid sequence information particular to the IC23927 molecules of the present invention, including but not limited to full-length nucleotide and/or amino acid sequences, partial nucleotide and/or amino acid sequences, polymorphic sequences including single nucleotide polymorphisms (SNPs), epitope sequences, and the like. Moreover, information “related to” said IC23927 sequence information includes detection of the presence or absence of a sequence (e.g., detection of expression of a sequence, fragment, polymorphism, etc.), determination of the level of a sequence (e.g., detection of a level of expression, for example, a quantitative detection), detection of a reactivity to a sequence (e.g., detection of protein expression and/or levels, for example, using a sequence-specific antibody), and the like. As used herein, “electronic apparatus readable media” refers to any suitable medium for storing, holding or containing data or information that can be read and accessed directly by an electronic apparatus. Such media can include, but are not limited to: magnetic storage media, such as floppy discs, hard disc storage medium, and magnetic tape; optical storage media such as compact disc; electronic storage media such as RAM, ROM, EPROM, EEPROM and the like; general hard disks and hybrids of these categories such as magnetic/optical storage media. The medium is adapted or configured for having recorded thereon IC23927 sequence information of the present invention.

[0905] As used herein, the term “electronic apparatus” is intended to include any suitable computing or processing apparatus or other device configured or adapted for storing data or information. Examples of electronic apparatus suitable for use with the present invention include stand-alone computing apparatus; networks, including a local area network (LAN), a wide area network (WAN) Internet, Intranet, and Extranet; electronic appliances such as a personal digital assistants (PDAs), cellular phone, pager and the like; and local and distributed processing systems.

[0906] As used herein, “recorded” refers to a process for storing or encoding information on the electronic apparatus readable medium. Those skilled in the art can readily adopt any of the presently known methods for recording information on known media to generate manufactures comprising the IC23927 sequence information.

[0907] A variety of software programs and formats can be used to store the sequence information on the electronic apparatus readable medium. For example, the sequence information can be represented in a word processing text file, formatted in commercially-available software such as WordPerfect and Microsoft Word, or represented in the form of an ASCII file, stored in a database application, such as DB2, Sybase, Oracle, or the like, as well as in other forms. Any number of data processor structuring formats (e.g., text file or database) may be employed in order to obtain or create a medium having recorded thereon the IC23927 sequence information.

[0908] By providing IC23927 sequence information in readable form, one can routinely access the sequence information for a variety of purposes. For example, one skilled in the art can use the sequence information in readable form to compare a target sequence or target structural motif with the sequence information stored within the data storage means. Search means are used to identify fragments or regions of the sequences of the invention which match a particular target sequence or target motif.

[0909] The present invention therefore provides a medium for holding instructions for performing a method for determining whether a subject has a IC23927-associated disease or disorder or a pre-disposition to a IC23927-associated disease or disorder, wherein the method comprises the steps of determining IC23927 sequence information associated with the subject and based on the IC23927 sequence information, determining whether the subject has a IC23927-associated disease or disorder or a pre-disposition to a IC23927-associated disease or disorder and/or recommending a particular treatment for the disease, disorder or pre-disease condition.

[0910] The present invention further provides in an electronic system and/or in a network, a method for determining whether a subject has a IC23927-associated disease or disorder or a pre-disposition to a disease associated with a IC23927 wherein the method comprises the steps of determining IC23927 sequence information associated with the subject, and based on the IC23927 sequence information, determining whether the subject has a IC23927-associated disease or disorder or a pre-disposition to a IC23927-associated disease or disorder, and/or recommending a particular treatment for the disease, disorder or pre-disease condition. The method may further comprise the step of receiving phenotypic information associated with the subject and/or acquiring from a network phenotypic information associated with the subject.

[0911] The present invention also provides in a network, a method for determining whether a subject has a IC23927-associated disease or disorder or a pre-disposition to a IC23927 associated disease or disorder associated with IC23927, said method comprising the steps of receiving IC23927 sequence information from the subject and/or information related thereto, receiving phenotypic information associated with the subject, acquiring information from the network corresponding to IC23927 and/or a IC23927-associated disease or disorder, and based on one or more of the phenotypic information, the IC23927 information (e.g., sequence information and/or information related thereto), and the acquired information, determining whether the subject has a IC23927-associated disease or disorder or a pre-disposition to a IC23927-associated disease or disorder (e.g., a pain disorder). The method may further comprise the step of recommending a particular treatment for the disease, disorder or pre-disease condition.

[0912] The present invention also provides a business method for determining whether a subject has a IC23927-associated disease or disorder or a pre-disposition to a IC23927-associated disease or disorder, said method comprising the steps of receiving information related to IC23927 (e.g., sequence information and/or information related thereto), receiving phenotypic information associated with the subject, acquiring information from the network related to IC23927 and/or related to a IC23927-associated disease or disorder, and based on one or more of the phenotypic information, the IC23927 information, and the acquired information, determining whether the subject has a IC23927-associated disease or disorder or a pre-disposition to a IC23927-associated disease or disorder. The method may further comprise the step of recommending a particular treatment for the disease, disorder or pre-disease condition.

[0913] The invention also includes an array comprising a IC23927 sequence of the present invention. The array can be used to assay expression of one or more genes in the array. In one embodiment, the array can be used to assay gene expression in a tissue to ascertain tissue specificity of genes in the array. In this manner, up to about 7600 genes can be simultaneously assayed for expression, one of which can be IC23927. This allows a profile to be developed showing a battery of genes specifically expressed in one or more tissues.

[0914] In addition to such qualitative determination, the invention allows the quantitation of gene expression. Thus, not only tissue specificity, but also the level of expression of a battery of genes in the tissue is ascertainable. Thus, genes can be grouped on the basis of their tissue expression per se and level of expression in that tissue. This is useful, for example, in ascertaining the relationship of gene expression between or among tissues. Thus, one tissue can be perturbed and the effect on gene expression in a second tissue can be determined. In this context, the effect of one cell type on another cell type in response to a biological stimulus can be determined. Such a determination is useful, for example, to know the effect of cell-cell interaction at the level of gene expression. If an agent is administered therapeutically to treat one cell type but has an undesirable effect on another cell type, the invention provides an assay to determine the molecular basis of the undesirable effect and thus provides the opportunity to co-administer a counteracting agent or otherwise treat the undesired effect. Similarly, even within a single cell type, undesirable biological effects can be determined at the molecular level. Thus, the effects of an agent on expression of other than the target gene can be ascertained and counteracted.

[0915] In another embodiment, the array can be used to monitor the time course of expression of one or more genes in the array. This can occur in various biological contexts, as disclosed herein, for example development of a IC23927-associated disease or disorder, progression of IC23927-associated disease or disorder, and processes, such a cellular transformation associated with the IC23927-associated disease or disorder.

[0916] The array is also useful for ascertaining the effect of the expression of a gene on the expression of other genes in the same cell or in different cells (e.g., ascertaining the effect of IC23927 expression on the expression of other genes). This provides, for example, for a selection of alternate molecular targets for therapeutic intervention if the ultimate or downstream target cannot be regulated.

[0917] The array is also useful for ascertaining differential expression patterns of one or more genes in normal and abnormal cells. This provides a battery of genes (e.g., including IC23927) that could serve as a molecular target for diagnosis or therapeutic intervention.

[0918] This invention is further illustrated by the following examples which should not be construed as limiting. The contents of all references, patents and published patent applications cited throughout this application, as well as the Figures and the Sequence Listing, are incorporated herein by reference.

### EXAMPLES

### Example 1

### Identification and Characterization of Human IC23927 cDNA

[0919] In this example, the identification and characterization of the gene encoding human IC23927 (clone Fbh23927) is described.

[0920] Isolation of the IC23927 cDNA

[0921] The invention is based, at least in part, on the discovery of a human gene encoding a novel protein, referred to herein as IC23927. The entire sequence of the human clone Fbh23927 was determined and found to contain an open reading frame termed human “IC23927.”

[0922] The nucleotide sequence encoding the human IC23927 protein is shown in FIGS. 16A-G and is set forth as SEQ ID NO:21. The protein encoded by this nucleic acid comprises about 816 amino acids and has the amino acid sequence shown in FIGS. 16A-G and set forth as SEQ ID NO:22. The coding region (open reading frame) of SEQ ID NO:21 is set forth as SEQ ID NO:23. Clone Fbh23927, comprising the coding region of human IC23927, was deposited with the American Type Culture Collection (ATCC®), 10801 University Boulevard, Manassas, Va. 20110-2209, on ______, and assigned Accession No. ______.

[0923] Analysis of the Human IC23927 Molecule

[0924] A BLAST search against the PNU database, of the nucleotide sequence of human IC23927 revealed that human IC23927 protein is homologous to a human KIAA1169 protein sequence (GenBank™ Accession Number BAA86486) over translated nucleic acid residues 411-2735. This search further revealed that human IC23927 has homology to rat voltage-gated Ca channel (GenBank™ Accession Number BAA76556) over translated nucleic acid residues 288-2735. This search further revealed that human IC23927 has homology to a putative calcium channel from Arabidopsis thaliana (GenBank™ Accession Number AAD15312) over translated nucleic acid residues 786-2357. This search further revealed that human IC23927 has homology to a voltage-gated calcium channel α1 subunit from Cyanea capillata (GenBank™ Accession Number AAC63050) over translated nucleic acid residues 1053-2060, over translated nucleic acid residues 723-1268, over translated nucleic acid residues 1596-2399, over translated nucleic acid residues 1596-2357, over translated nucleic acid residues 1947-1099, over translated nucleic acid residues 327-1301, over translated nucleic acid residues 717-1091 and over translated nucleic acid residues 2130-4779. This search further revealed that human IC23927 has homology to an N-type calcium channel α-1B cdB5 variant from Gallus gallus (GenBank™ Accession Number AAD51819) over translated nucleic acid residues 1053-2060, over translated nucleic acid residues 723-1268, over translated nucleic acid residues 1596-2399, over translated nucleic acid residues 1596-2357, over translated nucleic acid residues 1947-1099, over translated nucleic acid residues 327-1301, over translated nucleic acid residues 717-1091 and over translated nucleic acid residues 2130-4779. A Clustal alignment of the translated cDNA sequence of human IC23927 with the top two hits is provided in FIGS. 18A-C.

[0925] A MEMSAT analysis was performed, and correlated with an analysis of the hydrophilicity and surface probability of human IC23927 (FIG. 17), resulting in the identification of twelve transmembrane domains in the amino acid sequence of human IC23927 (SEQ ID NO:22) at about residues 114-128, residues 146-168, residues 178-195, residues 199-210 (or about residues 199-220), residues 233-254, residues 298-320, residues 445-465, residues 482-502 (or about residues 482-503), residues 510-532, residues 539-554, residues 570-594, and residues 666-687.

[0926] A search was also performed against the Prosite database, and resulted in the identification of 4 N-glycosylation sites at amino acid residues 599-602, 611-614, 616-619 and 695-698 of the IC23927 protein, 7 protein kinase C (PKC) phosphorylation sites at amino acid residues 351-353, 359-361, 375-377, 382-384, 395-397, 697-699 and 769-771 of the IC23927 protein, 16 casein kinase II phosphorylation sites at amino acid residues 4-7, 14-17, 54-57, 123-126, 264-267, 322-325, 375-378, 395-398, 559-562, 602-605, 618-621, 639-642, 703-706, 716-719, 745-748 and 764-767 of the IC23927 protein, 1 tyrosine kinase phosphorylation site at amino acid residues 617-625 of the IC23927 protein, 3 N-myristoylation sites at amino acid residues 39-44, 217-222 and 468-473 of the IC23927 protein, and 1 amidation site at amino acid residues 758-761 of the IC23927 protein.

[0927] A search was also performed against the PFAM database resulting in the identification of an ion transport protein domain in human IC23927 (SEQ ID NO:22) at about residues 437-686. The Hidden Markov Model for this domain has Accession No. PF00520.

[0928] A search was also performed against the ProDom database resulting in hits to the following Prodom entries including “Channel Probable Protein Ionic Transmembrane Ion Transport Voltage-Gated Calcium Channel Calcium”, “Probable GTP-Binding Protein MG384 Homolog”, and “Channel Calcium Ionic Subunit Voltage-Gated Sodium αTransmembrane L-type Ion”.

[0929] A PSORT prediction of protein localization predicted the presence of a coiled coil from about amino acid residues 768 to 796 of SEQ ID NO:22 and predicted the presence of IC23927 in at least one of the following locations: endoplasmic reticulum (score of 66.7%), mitochondria (score of 11.1%), vesicles of secretory system (score of 11.1%) and vacuolar (score of 11.1%). Accordingly, IC23927 may be localized to at least one of the endoplasmic reticulum, the mitochondria, vesicles of the secretory system, vacuoles and/or the plasma membrane.

[0930] The tissue distribution of the IC23927 homolog KIAA1699 has been determined by RT-PCR-ELISA using the following primers: forward, CCAGAGCGAGTTAATGTGTCC (SEQ ID NO:26), and reverse, AGCTGTCCCTAACCTCAATGA (SEQ ID NO:27). The mRNA has been found to be expressed at significant levels in heart, kidney, spleen, B. cerebellum and spinal cord. Radiation hybrid mapping analysis has placed the IC23927 gene on chromosome 12.

[0931] Tissue Expression Analysis of Human IC23927 mRNA Using Tagman Analysis

[0932] This example describes the tissue distribution of human IC23927 mRNA in a variety of cells and tissues, as determined using the TaqMan™ procedure. The Taqman™ procedure is a quantitative, reverse transcription PCR-based approach for detecting mRNA. The RT-PCR reaction exploits the 5′ nuclease activity of AmpliTaq Gold™ DNA Polymerase to cleave a TaqMan™ probe during PCR. Briefly, cDNA was generated from the samples of interest, e.g., brain, testis, spinal cord, skin, dorsal root ganglia, placenta, etc., and used as the starting material for PCR amplification. In addition to the 5′ and 3′ gene-specific primers, a gene-specific oligonucleotide probe (complementary to the region being amplified) was included in the reaction (i.e., the Taqman™ probe). The TaqMan™ probe includes the oligonucleotide with a fluorescent reporter dye covalently linked to the 5′ end of the probe (such as FAM (6-carboxyfluorescein), TET (6-carboxy-4,7,2′,7′-tetrachlorofluorescein), JOE (6-carboxy-4,5-dichloro-2,7-dimethoxyfluorescein), or VIC) and a quencher dye (TAMRA (6-carboxy-N,N,N′,N′-tetramethylrhodamine) at the 3′ end of the probe.

[0933] During the PCR reaction, cleavage of the probe separates the reporter dye and the quencher dye, resulting in increased fluorescence of the reporter. Accumulation of PCR products is detected directly by monitoring the increase in fluorescence of the reporter dye. When the probe is intact, the proximity of the reporter dye to the quencher dye results in suppression of the reporter fluorescence. During PCR, if the target of interest is present, the probe specifically anneals between the forward and reverse primer sites. The 5′-3′ nucleolytic activity of the AmpliTaq™ Gold DNA Polymerase cleaves the probe between the reporter and the quencher only if the probe hybridizes to the target. The probe fragments are then displaced from the target, and polymerization of the strand continues. The 3′ end of the probe is blocked to prevent extension of the probe during PCR. This process occurs in every cycle and does not interfere with the exponential accumulation of product. RNA was prepared using the trizol method and treated with DNase to remove contaminating genomic DNA. cDNA was synthesized using standard techniques. Mock cDNA synthesis in the absence of reverse transcriptase resulted in samples with no detectable PCR amplification of the control gene confirms efficient removal of genomic DNA contamination.

[0934] A human normal tissue panel indicated that human IC23927 is expressed at the highest levels in human brain, followed human kidney and testes (see Table 1, below).

TABLE 1
Tissue Expression Analysis of Human IC23927 mRNA Using
Taqman Analysis of Normal Human Tissues

| | 23927 | | | Relative |
|---|---|---|---|---|
| Tissue Type | Mean | β 2 Mean | δ Ct | Expression |
| Adrenal Gland | 31.12 | 18.89 | 12.23 | 0.21 |
| Brain | 29.50 | 20.37 | 9.14 | 1.78 |
| Heart | 31.92 | 18.95 | 12.97 | 0.13 |
| Kidney | 27.63 | 18.07 | 9.56 | 1.32 |
| Liver | 34.13 | 19.16 | 14.97 | 0.03 |
| Lung | 33.00 | 16.96 | 16.04 | 0.01 |
| Mammary Gland | 32.04 | 17.77 | 14.27 | 0.05 |
| Placenta | 30.09 | 18.59 | 11.50 | 0.35 |
| Prostate | 31.83 | 18.48 | 13.35 | 0.10 |
| Salivary Gland | 31.21 | 19.09 | 12.12 | 0.22 |
| Muscle | 32.02 | 20.96 | 11.07 | 0.47 |
| Sm. Intestine | 31.49 | 18.36 | 13.13 | 0.11 |
| Spleen | 33.17 | 16.58 | 16.60 | 0.01 |
| Stomach | 33.00 | 18.57 | 14.43 | 0.05 |
| Teste | 30.74 | 20.07 | 10.67 | 0.61 |
| Thymus | 33.44 | 18.42 | 15.02 | 0.03 |
| Trachea | 32.72 | 19.03 | 13.69 | 0.08 |
| Uterus | 34.33 | 18.63 | 15.70 | 0.02 |
| Spinal Cord | 31.91 | 18.98 | 12.93 | 0.13 |
| Skin | 33.18 | 17.17 | 16.01 | 0.02 |
| dorsal root gang. | 33.41 | 19.27 | 14.14 | 0.06 |

[0935] This expression pattern was confirmed in further experimentation using the following panel of samples (MK=monkey samples).

TABLE 2
Tissue Expression Analysis of Human IC23927 mRNA Using
Taqman Analysis of Normal Human Tissues

| | 23297 | | | Relative |
|---|---|---|---|---|
| Tissue Type | avg. | HK avg. | δδ Ct | Expression |
| MK cortex | 40 | 22.35 | 17.485 | 0.00545118 |
| MK DRG | 40 | 19.405 | 20.43 | 0.00070788 |
| MK spinal cord | 40 | 21.175 | 18.66 | 0.00241424 |
| MK sciatic nerve | 40 | 19.14 | 20.695 | 0.00058909 |
| MK kidney | 40 | 19.4 | 20.435 | 0.00070543 |
| MK hairy skin | 40 | 20.51 | 19.325 | 0.00152263 |
| MK heart LV | 40 | 19.995 | 19.84 | 0.00106553 |
| MK gastro muscle | 40 | 21.065 | 18.77 | 0.00223701 |
| MK liver | 40 | 20.67 | 19.165 | 0.00170122 |
| Hu. Brain | 28.38 | 19.6 | 8.615 | 2.5505074 |
| Hu. Spinal cord | 33.415 | 18.755 | 14.495 | 0.04330821 |
| Hu. Heart | 36.24 | 18.42 | 17.655 | 0.00484524 |
| Hu. Kidney | 29.41 | 18.64 | 10.605 | 0.6420619 |
| Hu. Liver | 39.2 | 18.98 | 20.055 | 0.000918 |
| Hu. Lung | 40 | 16.39 | 23.445 | 8.76E-05 |
| NTC | 40 | 39.835 | 0 | 1000 |
| NTC | 40 | 40 | -0.165 | 1121.16608 |

[0936] Moreover, expression in a more detailed panel of normal and disease samples confirmed this pattern of expression.

TABLE 3
Tissue Expression Analysis of Human IC23927 mRNA Using
Taqman Analysis of Normal and Diseased Human Tissues

| | 23927 | | | Relative |
|---|---|---|---|---|
| Tissue Type | Mean | β 2 Mean | ∂∂ Ct | Expression |
| Artery normal | 27.25 | 24.09 | 3.16 | 111.8781 |
| Aorta diseased | 28.18 | 23.64 | 4.54 | 42.9857 |
| Vein normal | 27.48 | 20.88 | 6.61 | 10.273 |
| Coronary SMC | 28.45 | 24.31 | 4.14 | 56.5237 |
| HUVEC | 27.72 | 22.53 | 5.18 | 27.489 |
| Hemangioma | 26.58 | 21.48 | 5.11 | 29.0564 |
| Heart normal | 26.3 | 21.56 | 4.74 | 37.4212 |
| Heart CHF | 24.27 | 20.66 | 3.6 | 82.4692 |
| Kidney | 24.45 | 21.45 | 3 | 124.5675 |
| Skeletal Muscle | 28.1 | 23.59 | 4.51 | 43.8889 |
| Adipose normal | 28.59 | 22.5 | 6.09 | 14.68 |
| Pancreas | 27.49 | 23.11 | 4.38 | 48.0273 |
| primary osteoblasts | 28.95 | 22.13 | 6.83 | 8.82 |
| Osteoclasts (diff) | 26.73 | 18.83 | 7.89 | 4.2011 |
| Skin normal | 28.93 | 23.22 | 5.71 | 19.1038 |
| Spinal cord normal | 27.38 | 22.89 | 4.49 | 44.6561 |
| Brain Cortex normal | 26.16 | 23.97 | 2.19 | 218.3932 |
| Brain Hypothalamus normal | 27.28 | 23.16 | 4.13 | 57.3128 |
| Nerve | 27.48 | 23.97 | 3.52 | 87.1715 |
| DRG (Dorsal Root Ganglion) | 26.84 | 23.48 | 3.36 | 97.3956 |
| Breast normal | 26.95 | 22.26 | 4.69 | 38.7409 |
| Breast tumor | 27.41 | 22.27 | 5.13 | 28.5572 |
| Ovary normal | 25.98 | 21.58 | 4.39 | 47.5306 |
| Ovary Tumor | 27.43 | 21.23 | 6.2 | 13.6024 |
| Prostate Normal | 27.5 | 22.61 | 4.88 | 33.9605 |
| Prostate Tumor | 26.7 | 22 | 4.71 | 38.3402 |
| Salivary glands | 26.64 | 21.89 | 4.75 | 37.1627 |
| Colon normal | 26.42 | 19.7 | 6.72 | 9.4859 |
| Colon Tumor | 25.26 | 20.25 | 5 | 31.1419 |
| Lung normal | 26.56 | 19.64 | 6.92 | 8.2294 |
| Lung tumor | 25.9 | 22.06 | 3.84 | 70.0729 |
| Lung COPD | 25.91 | 22.78 | 3.13 | 113.8337 |
| Colon IBD | 25.97 | 18.73 | 7.24 | 6.6152 |
| Liver normal | 27.14 | 21.02 | 6.13 | 14.3282 |
| Liver fibrosis | 28.18 | 22.7 | 5.47 | 22.5614 |
| Spleen normal | 27.06 | 20.97 | 6.09 | 14.6293 |
| Tonsil normal | 24.31 | 19.09 | 5.22 | 26.7373 |
| Lymph node normal | 26.56 | 20.39 | 6.17 | 13.8401 |
| Small intestine normal | 27.9 | 21.4 | 6.5 | 11.0485 |
| Skin-Decubitus | 28.05 | 23.41 | 4.63 | 40.2463 |
| Synovium | 28.19 | 21.06 | 7.13 | 7.1146 |
| BM-MNC | 29.26 | 20.35 | 8.91 | 2.0788 |
| Activated PBMC | 27.6 | 19.38 | 8.22 | 3.3538 |
| Neutrophils | 27.66 | 20.59 | 7.06 | 7.4943 |
| Megakaryocytes | 25.93 | 19.95 | 5.99 | 15.7337 |
| Erythroid | 26.68 | 22.91 | 3.77 | 73.3022 |

### Example 2

### Expression of Recombinant IC23927 Protein in Bacterial Cells

[0937] In this example, IC23927 is expressed as a recombinant glutathione-S-transferase (GST) fusion polypeptide in E. coli and the fusion polypeptide is isolated and characterized. Specifically, IC23927 is fused to GST and this fusion polypeptide is expressed in E. coli, e.g., strain PEB199. Expression of the GST-IC23927 fusion protein in PEB199 is induced with IPTG. The recombinant fusion polypeptide is purified from crude bacterial lysates of the induced PEB199 strain by affinity chromatography on glutathione beads. Using polyacrylamide gel electrophoretic analysis of the polypeptide purified from the bacterial lysates, the molecular weight of the resultant fusion polypeptide is determined.

### Example 3

### Expession of Recombinant IC23927 Protein in COS Cells

[0938] To express the IC23927 gene in COS cells, the pcDNA/Amp vector by Invitrogen Corporation (San Diego, Calif.) is used. This vector contains an SV40 origin of replication, an ampicillin resistance gene, an E. coli replication origin, a CMV promoter followed by a polylinker region, and an SV40 intron and polyadenylation site. A DNA fragment encoding the entire IC23927 protein and an HA tag (Wilson et al. (1984) Cell 37:767) or a FLAG tag fused in-frame to its 3′ end of the fragment is cloned into the polylinker region of the vector, thereby placing the expression of the recombinant protein under the control of the CMV promoter.

[0939] To construct the plasmid, the IC23927 DNA sequence is amplified by PCR using two primers. The 5′ primer contains the restriction site of interest followed by approximately twenty nucleotides of the IC23927 coding sequence starting from the initiation codon; the 3′ end sequence contains complementary sequences to the other restriction site of interest, a translation stop codon, the HA tag or FLAG tag and the last 20 nucleotides of the IC23927 coding sequence. The PCR amplified fragment and the pCDNA/Amp vector are digested with the appropriate restriction enzymes and the vector is dephosphorylated using the CIAP enzyme (New England Biolabs, Beverly, Mass.). Preferably the two restriction sites chosen are different so that the IC23927 gene is inserted in the correct orientation. The ligation mixture is transformed into E. coli cells (strains HB101, DH5α, SURE, available from Stratagene Cloning Systems, La Jolla, Calif., can be used), the transformed culture is plated on ampicillin media plates, and resistant colonies are selected. Plasmid DNA is isolated from transformants and examined by restriction analysis for the presence of the correct fragment.

[0940] COS cells are subsequently transfected with the IC23927-pcDNA/Amp plasmid DNA using the calcium phosphate or calcium chloride co-precipitation methods, DEAE-dextran-mediated transfection, lipofection, or electroporation. Other suitable methods for transfecting host cells can be found in Sambrook, J., Fritsh, E. F., and Maniatis, T. Molecular Cloning: A Laboratory Manual. 2nd, ed., Cold Spring Harbor Laboratory, Cold Spring Harbor Laboratory Press, Cold Spring Harbor, N.Y., 1989. The expression of the IC23927 polypeptide is detected by radiolabeling (³⁵S-methionine or ³⁵S-cysteine available from NEN, Boston, Mass., can be used) and immunoprecipitation (Harlow, E. and Lane, D. Antibodies: A Laboratory Manual, Cold Spring Harbor Laboratory Press, Cold Spring Harbor, N.Y., 1988) using an HA specific monoclonal antibody. Briefly, the cells are labeled for 8 hours with ³⁵S-methionine (or ³⁵S-cysteine). The culture media are then collected and the cells are lysed using detergents (RIPA buffer, 150 mM NaCl, 1% NP-40, 0.1% SDS, 0.5% DOC, 50 mM Tris, pH 7.5). Both the cell lysate and the culture media are precipitated with an HA specific monoclonal antibody. Precipitated polypeptides are then analyzed by SDS-PAGE.

[0941] Alternatively, DNA containing the IC23927 coding sequence is cloned directly into the polylinker of the pCDNA/Amp vector using the appropriate restriction sites. The resulting plasmid is transfected into COS cells in the manner described above, and the expression of the IC23927 polypeptide is detected by radiolabeling and immunoprecipitation using an IC23927 specific monoclonal antibody.

[0942] IV. 12303, A NOVEL HUMAN TWIK MOLECULE AND USES THEREOF

### Background of the Invention

[0943] Potassium (K⁺) channels are ubiquitous proteins which are involved in the setting of the resting membrane potential as well as in the modulation of the electrical activity of cells. In excitable cells, K⁺ channels influence action potential waveforms, firing frequency, and neurotransmitter secretion (Rudy, B. (1988) Neuroscience, 25, 729-749; Hille, B. (1992) Ionic Channels of Excitable Membranes, 2nd Ed.). In non-excitable cells, they are involved in hormone secretion, cell volume regulation and potentially in cell proliferation and differentiation (Lewis et al. (1995) Annu. Rev. Immunol., 13, 623-653). Developments in electrophysiology have allowed the identification and the characterization of an astonishing variety of K⁺ channels that differ in their biophysical properties, pharmacology, regulation and tissue distribution (Rudy, B. (1988) Neuroscience, 25, 729-749; Hille, B. (1992) Ionic Channels of Excitable Membranes, 2nd Ed.). More recently, cloning efforts have shed considerable light on the mechanisms that determine this functional diversity. Furthermore, analyses of structure-function relationships have provided an important set of data concerning the molecular basis of the biophysical properties (selectivity, gating, assembly) and the pharmacological properties of cloned K⁺ channels.

[0944] Functional diversity of K⁺ channels arises mainly from the existence of a great number of genes coding for pore-forming subunits, as well as for other associated regulatory subunits. Two main structural families of pore-forming subunits have been identified. The first one consists of subunits with a conserved hydrophobic core containing six transmembrane domains (TMDs). These K⁺ channel α subunits participate in the formation of outward rectifier voltage-gated (Kv) and Ca²⁺-dependent K⁺ channels. The fourth TMD contains repeated positive charges involved in the voltage gating of these channels and hence in their outward rectification (Logothetis et al. (1992) Neuron, 8, 531-540; Bezanilla et al. (1994) Biophys. J. 66, 1011-1021).

[0945] The second family of pore-forming subunits have only two TMDs. They are essential subunits of inward-rectifying (IRK), G-protein-coupled (GIRK) and ATP-sensitive (K_{ATP}) K⁺ channels. The inward rectification results from a voltage-dependent block by cytoplasmic Mg²⁺ and polyamines (Matsuda, H. (1991) Annu. Rev. Physiol., 53, 289-298). A conserved domain, called the P domain, is present in all members of both families (Pongs, O. (1993) J. Membr. Biol., 136, 1-8; Heginbotham et al. (1994) Biophys. J. 66,1061-1067; Mackinnon, R. (1995) Neuron, 14, 889-892; Pascual et al., (1995) Neuron., and 14, 1055-1063). This domain is an essential element of the aqueous K⁺-selective pore. In both groups, the assembly of four subunits is necessary to form a functional K⁺ channel (Mackinnon, R. (1991) Nature, 350, 232-235; Yang et al., (1995) Neuron, 15, 1441-1447.

[0946] In both six TMD and two TMD pore-forming subunit families, different subunits coded by different genes can associate to form heterotetramers with new channel properties (Isacoff et al., (1990) Nature, 345, 530-534). A selective formation of heteropolymeric channels may allow each cell to develop the best K⁺ current repertoire suited to its function. Pore-forming α subunits of Kv channels are classified into different subfamilies according to their sequence similarity (Chandy et al. (1993) Trends Pharmacol. Sci., 14: 434). Tetramerization is believed to occur preferentially between members of each subgroup (Covarrubias et al. (1991) Neuron, 7, 763-773). The domain responsible for this selective association is localized in the N-terminal region and is conserved between members of the same subgroup. This domain is necessary for hetero- but not homo-multimeric assembly within a subfamily and prevents co-assembly between subfamilies. Recently, pore-forming subunits with two TMDs were also shown to co-assemble to form heteropolymers (Duprat et al. (1995) Biochem. Biophys. Res. Commun., 212, 657-663. This heteropolymerization seems necessary to give functional GIRKs. IRKs are active as homopolymers but also form heteropolymers.

[0947] New structural types of K⁺ channels were identified recently in both humans and yeast. These channels have two P domains in their functional subunit instead of only one (Ketchum et al. (1995) Nature, 376, 690-695; Lesage et al. (1996) J. Biol. Chem, 271, 4183-4187; Lesage et al. (1996) EMBO J., 15, 1004-1011; Reid et al. (1996) Receptors Channels 4, 51-62). The human channel called TWIK-1, has four TMDs. TWIK-1 is expressed widely in human tissues and is particularly abundant in the heart and the brain. TWIK-1 currents are time independent and inwardly rectifying. These properties suggest that TWIK-1 channels are involved in the control of the background K⁺ membrane conductance (Lesage et al. (1996) EMBO J., 15, 1004-1011).

### Summary of the Invention

[0948] The present invention is based, at least in part, on the discovery of novel members of the TWIK (for Tandem of P domains in a Weak Inward rectifying K⁺ channel)-like family of potassium channels, referred to herein as TWIK-8 nucleic acid and protein molecules. The TWIK-8 molecules of the present invention are useful as targets for developing modulating agents to regulate a variety of cellular processes. Accordingly, in one aspect, this invention provides isolated nucleic acid molecules encoding TWIK-8 proteins or biologically active portions thereof, as well as nucleic acid fragments suitable as primers or hybridization probes for the detection of TWIK-8-encoding nucleic acids.

[0949] In one embodiment, a TWIK-8 nucleic acid molecule of the invention is at least 50%, 55%, 60%, 65%, 70%, 75%, 80%, 85%, 90%, 91%, 92%, 93%, 94%, 95%, 96%, 97%, 98%, 99% or more identical to the nucleotide sequence (e.g., to the entire length of the nucleotide sequence) shown in SEQ ID NO:28 or 30 or the nucleotide sequence of the DNA insert of the plasmid deposited with ATCC as Accession Number ______, or a complement thereof. In a preferred embodiment, the isolated nucleic acid molecule includes the nucleotide sequence shown SEQ ID NO:28 or 30, or a complement thereof. In another embodiment, the nucleic acid molecule includes SEQ ID NO:30 and nucleotides 1-83 of SEQ ID NO:28. In yet another embodiment, the nucleic acid molecule includes SEQ ID NO:30 and nucleotides 1344-1408 of SEQ ID NO:28. In another preferred embodiment, the nucleic acid molecule consists of the nucleotide sequence shown in SEQ ID NO:28 or 30. In another preferred embodiment, the nucleic acid molecule includes a fragment of at least 50, 100, 150, 200, 250, 300, 350, 400, 450, 500, 550, 600, 650, 700, 750, 800, 850, 900, 950, 1000, 1050, 1100, 1150, 1200, 1250, 1300, 1350, or 1400, nucleotides (e.g., contiguous nucleotides) of the nucleotide sequence of SEQ ID NO:28 or 30, or a complement thereof.

[0950] In another embodiment, a TWIK-8 nucleic acid molecule includes a nucleotide sequence encoding a protein having an amino acid sequence sufficiently identical to the amino acid sequence of SEQ ID NO:29 or an amino acid sequence encoded by the DNA insert of the plasmid deposited with ATCC as Accession Number ______. In a preferred embodiment, a TWIK-8 nucleic acid molecule includes a nucleotide sequence encoding a protein having an amino acid sequence at least 50%, 55%, 60%, 65%, 70%, 75%, 80%, 85%, 90%, 91%, 92%, 93%, 94%, 95%, 96%, 97%, 98%, 99% or more identical to the entire length of the amino acid sequence of SEQ ID NO:29 or the amino acid sequence encoded by the DNA insert of the plasmid deposited with ATCC as Accession Number ______.

[0951] In another preferred embodiment, an isolated nucleic acid molecule encodes the amino acid sequence of human TWIK-8. In yet another preferred embodiment, the nucleic acid molecule includes a nucleotide sequence encoding a protein having the amino acid sequence of SEQ ID NO:29, or the amino acid sequence encoded by the DNA insert of the plasmid deposited with ATCC as Accession Number ______.

[0952] Another embodiment of the invention features nucleic acid molecules, preferably TWIK-8 nucleic acid molecules, which specifically detect TWIK-8 nucleic acid molecules relative to nucleic acid molecules encoding non-TWIK-8 proteins. For example, in one embodiment, such a nucleic acid molecule is at least 50, 100, 150, 200, 250, 300, 350, 400, 450, 500, 550, 600, 650, 700, 750, 800, 850, 900, 950, 1000, 1050, 1100, 1150, 1200, 1250, 1300, 1350, 1400, 1450, 1500, or more nucleotides in length and hybridizes under stringent conditions to a nucleic acid molecule comprising the nucleotide sequence shown in SEQ ID NO:28, the nucleotide sequence of the DNA insert of the plasmid deposited with ATCC as Accession Number ______, or a complement thereof.

[0953] In other preferred embodiments, the nucleic acid molecule encodes a naturally occurring allelic variant of a polypeptide comprising the amino acid sequence of SEQ ID NO:29 or an amino acid sequence encoded by the DNA insert of the plasmid deposited with ATCC as Accession Number ______, wherein the nucleic acid molecule hybridizes to a nucleic acid molecule comprising SEQ ID NO:28 or 30 under stringent conditions.

[0954] Another embodiment of the invention provides an isolated nucleic acid molecule which is antisense to a TWIK-8 nucleic acid molecule, e.g., the coding strand of a TWIK-8 nucleic acid molecule.

[0955] Another aspect of the invention provides a vector comprising a TWIK-8 nucleic acid molecule. In certain embodiments, the vector is a recombinant expression vector. In another embodiment, the invention provides a host cell containing a vector of the invention. In yet another embodiment, the invention provides a host cell containing a nucleic acid molecule of the invention. The invention also provides a method for producing a protein, preferably a TWIK-8 protein, by culturing in a suitable medium, a host cell, e.g., a mammalian host cell such as a non-human mammalian cell, of the invention containing a recombinant expression vector, such that the protein is produced.

[0956] Another aspect of this invention features isolated or recombinant TWIK-8 proteins and polypeptides. In one embodiment, an isolated TWIK-8 protein includes at least one or more of the following domains: a transmembrane domain, a pore loop domain, a seven-transmembrane receptor domain, a cyclic nucleotide-gated channel domain, a TRAAK potassium channel domain, a potassium channel protein domain, a voltage-gated potassium channel domain, a potassium channel subunit domain, and an outward-rectifier TOK1 potassium channel domain.

[0957] In a preferred embodiment, a TWIK-8 protein includes at least one or more of the following domains: a transmembrane domain, a pore loop domain, a seven-transmembrane receptor domain, a cyclic nucleotide-gated channel domain, a TRAAK potassium channel domain, a potassium channel protein domain, a voltage-gated potassium channel domain, a potassium channel subunit domain, and an outward-rectifier TOK1 potassium channel domain, and has an amino acid sequence at least about 50%, 55%, 60%, 65%, 70%, 75%, 80%, 85%, 90%, 91%, 92%, 93%, 94%, 95%, 96%, 97%, 98%, 99% or more identical to the amino acid sequence of SEQ ID NO:29, or the amino acid sequence encoded by the DNA insert of the plasmid deposited with ATCC as Accession Number ______.

[0958] In another preferred embodiment, a TWIK-8 protein includes one or more of the following domains: a transmembrane domain, a pore loop domain, a seven-transmembrane receptor domain, a cyclic nucleotide-gated channel domain, a TRAAK potassium channel domain, a potassium channel protein domain, a voltage-gated potassium channel domain, a potassium channel subunit domain, and an outward-rectifier TOK1 potassium channel domain, and has a TWIK-8 activity (as described herein).

[0959] In yet another preferred embodiment, a TWIK-8 protein includes one or more of the following domains: a transmembrane domain, a pore loop domain, a seven-transmembrane receptor domain, a cyclic nucleotide-gated channel domain, a TRAAK potassium channel domain, a potassium channel protein domain, a voltage-gated potassium channel domain, a potassium channel subunit domain, and an outward-rectifier TOK1 potassium channel domain, and is encoded by a nucleic acid molecule having a nucleotide sequence which hybridizes under stringent hybridization conditions to a nucleic acid molecule comprising the nucleotide sequence of SEQ ID NO:28 or 30.

[0960] In another embodiment, the invention features fragments of the protein having the amino acid sequence of SEQ ID NO:29, wherein the fragment comprises at least 15 amino acids (e.g., 15 contiguous amino acids) of the amino acid sequence of SEQ ID NO:29, or an amino acid sequence encoded by the DNA insert of the plasmid deposited with the ATCC as Accession Number ______. In another embodiment, a TWIK-8 protein has the amino acid sequence of SEQ ID NO:29.

[0961] In another embodiment, the invention features a TWIK-8 protein which is encoded by a nucleic acid molecule consisting of a nucleotide sequence at least about 50%, 55%, 60%, 65%, 70%, 75%, 80%, 85%, 90%, 91%, 92%, 93%, 94%, 95%, 96%, 97%, 98%, 99% or more identical to a nucleotide sequence of SEQ ID NO:28 or 30, or a complement thereof. This invention further features a TWIK-8 protein, which is encoded by a nucleic acid molecule consisting of a nucleotide sequence which hybridizes under stringent hybridization conditions to a nucleic acid molecule comprising the nucleotide sequence of SEQ ID NO:28 or 30, or a complement thereof.

[0962] The proteins of the present invention or portions thereof, e.g., biologically active portions thereof, can be operatively linked to a non-TWIK-8 polypeptide (e.g., heterologous amino acid sequences) to form fusion proteins. The invention further features antibodies, such as monoclonal or polyclonal antibodies, that specifically bind proteins of the invention, preferably TWIK-8 proteins. In addition, the TWIK-8 proteins or biologically active portions thereof can be incorporated into pharmaceutical compositions, which optionally include pharmaceutically acceptable carriers.

[0963] In another aspect, the present invention provides a method for detecting the presence of a TWIK-8 nucleic acid molecule, protein, or polypeptide in a biological sample by contacting the biological sample with an agent capable of detecting a TWIK-8 nucleic acid molecule, protein, or polypeptide such that the presence of a TWIK-8 nucleic acid molecule, protein or polypeptide is detected in the biological sample.

[0964] In another aspect, the present invention provides a method for detecting the presence of TWIK-8 activity in a biological sample by contacting the biological sample with an agent capable of detecting an indicator of TWIK-8 activity such that the presence of TWIK-8 activity is detected in the biological sample.

[0965] In another aspect, the invention provides a method for modulating TWIK-8 activity comprising contacting a cell capable of expressing TWIK-8 with an agent that modulates TWIK-8 activity such that TWIK-8 activity in the cell is modulated. In one embodiment, the agent inhibits TWIK-8 activity. In another embodiment, the agent stimulates TWIK-8 activity. In one embodiment, the agent is an antibody that specifically binds to a TWIK-8 protein. In another embodiment, the agent modulates expression of TWIK-8 by modulating transcription of a TWIK-8 gene or translation of a TWIK-8 mRNA. In yet another embodiment, the agent is a nucleic acid molecule having a nucleotide sequence that is antisense to the coding strand of a TWIK-8 mRNA or a TWIK-8 gene.

[0966] In one embodiment, the methods of the present invention are used to treat a subject having a disorder characterized by aberrant or unwanted TWIK-8 protein or nucleic acid expression or activity by administering an agent which is a TWIK-8 modulator to the subject. In one embodiment, the TWIK-8 modulator is a TWIK-8 protein. In another embodiment the TWIK-8 modulator is a TWIK-8 nucleic acid molecule. In yet another embodiment, the TWIK-8 modulator is a peptide, peptidomimetic, or other small molecule. In a preferred embodiment, the disorder characterized by aberrant or unwanted TWIK-8 protein or nucleic acid expression is a CNS disorder, such as a cognitive or neurodegenerative disorder. In another preferred embodiment, the disorder characterized by aberrant or unwanted TWIK-8 protein or nucleic acid expression is a cardiovascular disorder. In another preferred embodiment, the disorder characterized by aberrant or unwanted TWIK-8 protein or nucleic acid expression is a muscular disorder. In another embodiment, the disorder characterized by aberrant or unwanted TWIK-8 activity is a cell proliferation, growth, differentiation, or migration disorder. In another embodiment, the disorder characterized by aberrant or unwanted TWIK-8 activity is a pain disorder, or a disorder characterized by misregulated pain signaling mechanisms.

[0967] The present invention also provides diagnostic assays for identifying the presence or absence of a genetic alteration characterized by at least one of (i) aberrant modification or mutation of a gene encoding a TWIK-8 protein; (ii) mis-regulation of the gene; and (iii) aberrant post-translational modification of a TWIK-8 protein, wherein a wild-type form of the gene encodes a protein with a TWIK-8 activity.

[0968] In another aspect the invention provides methods for identifying a compound that binds to or modulates the activity of a TWIK-8 protein, by providing an indicator composition comprising a TWIK-8 protein having TWIK-8 activity, contacting the indicator composition with a test compound, and determining the effect of the test compound on TWIK-8 activity in the indicator composition to identify a compound that modulates the activity of a TWIK-8 protein.

[0969] Other features and advantages of the invention will be apparent from the following detailed description and claims.

### Detailed Description of the Invention

[0970] The present invention is based, at least in part, on the discovery of novel molecules, referred to herein as TWIK-8 nucleic acid and protein molecules, which are novel members of the TWIK (for Tandem of P domains in a Weak Inward rectifying K⁺ channel)-like family of potassium channels. These novel molecules are capable of, for example, modulating a potassium channel mediated activity in a cell, e.g., a neuronal cell, or a muscle cell.

[0971] As used herein, a “potassium channel” includes a protein or polypeptide which is involved in receiving, conducting, and transmitting signals in an electrically excitable or a non-electrically excitable cell, e.g., a neuronal cell, or a muscle cell (e.g., a cardiac muscle cell). Potassium channels are potassium ion selective, and can determine membrane excitability (the ability of, for example, a neuron to respond to a stimulus and convert it into an impulse). Potassium channels can also influence the resting potential of membranes, wave forms and frequencies of action potentials, and thresholds of excitation. Potassium channels are typically expressed in electrically excitable cells, e.g., neurons, muscle, endocrine, and egg cells, and may form heteromultimeric structures, e.g., composed of pore-forming α and cytoplasmic β subunits. Potassium channels may also be found in non-excitable cells (e.g., spleen cells or prostate cells), where they may play a role in, e.g., signal transduction. Examples of potassium channels include: (1) the voltage-gated potassium channels, (2) the ligand-gated potassium channels, e.g., neurotransmitter-gated potassium channels, and (3) cyclic-nucleotide-gated potassium channels. Voltage-gated and ligand-gated potassium channels are expressed in the brain, e.g., in brainstem monoaminergic and forebrain cholinergic neurons, where they are involved in the release of neurotransmitters, or in the dendrites of hippocampal and neocortical pyramidal cells, where they are involved in the processes of learning and memory formation. For a detailed description of potassium channels, see Kandel E. R.. et al., Principles of Neural Science, second edition, (Elsevier Science Publishing Co., Inc., N.Y. (1985)), the contents of which are incorporated herein by reference. As the TWIK-like proteins of the present invention may modulate potassium channel mediated activities, they may be useful for developing novel diagnostic and therapeutic agents for potassium channel associated disorders.

[0972] As used herein, a “potassium channel associated disorder” includes a disorder, disease or condition which is characterized by a misregulation of a potassium channel mediated activity. Potassium channel associated disorders can detrimentally affect conveyance of sensory impulses from the periphery to the brain and/or conductance of motor impulses from the brain to the periphery; integration of reflexes; interpretation of sensory impulses; and emotional, intellectual (e.g., learning and memory), or motor processes.

[0973] Examples of potassium channel associated disorders include CNS disorders such as cognitive and neurodegenerative disorders, examples of which include, but are not limited to, Alzheimer's disease, dementias related to Alzheimer's disease (such as Pick's disease), Parkinson's and other Lewy diffuse body diseases, senile dementia, Huntington's disease, Gilles de la Tourette's syndrome, multiple sclerosis, amyotrophic lateral sclerosis, movement disorders, progressive supranuclear palsy, epilepsy, AIDS related dementia, and Jakob-Creutzfieldt disease; autonomic function disorders such as hypertension and sleep disorders, and neuropsychiatric disorders, such as depression, schizophrenia, schizoaffective disorder, korsakoff's psychosis, mania, anxiety disorders, or phobic disorders; learning or memory disorders, e.g., amnesia or age-related memory loss, attention deficit disorder, dysthymic disorder, major depressive disorder, mania, obsessive-compulsive disorder, psychoactive substance use disorders, anxiety, phobias, panic disorder, as well as bipolar affective disorder, e.g., severe bipolar affective (mood) disorder (BP-1), and bipolar affective neurological disorders, e.g., migraine and obesity. Further CNS-related disorders include, for example, those listed in the American Psychiatric Association's Diagnostic and Statistical manual of Mental Disorders (DSM), the most current version of which is incorporated herein by reference in its entirety.

[0974] Further examples of potassium channel associated disorders include cardiac-related disorders. Cardiovascular system disorders in which the TWIK-8 molecules of the invention may be directly or indirectly involved include arteriosclerosis, ischemia reperfusion injury, restenosis, arterial inflammation, vascular wall remodeling, ventricular remodeling, rapid ventricular pacing, coronary microembolism, tachycardia, bradycardia, pressure overload, aortic bending, coronary artery ligation, vascular heart disease, atrial fibrilation, Jervell syndrome, Lange-Nielsen syndrome, long-QT syndrome, congestive heart failure, sinus node dysfunction, angina, heart failure, hypertension, atrial fibrillation, atrial flutter, dilated cardiomyopathy, idiopathic cardiomyopathy, myocardial infarction, coronary artery disease, coronary artery spasm, and arrhythmia. TWIK-8-mediated or related disorders also include disorders of the musculoskeletal system such as paralysis and muscle weakness, e.g., ataxia, myotonia, and myokymia.

[0975] Other examples of potassium channel-associated disorders include pain disorders. Pain disorders include those disorders that affect pain signaling mechanisms. As used herein, the term “pain signaling mechanisms” includes the cellular mechanisms involved in the development and regulation of pain, e.g., pain elicited by noxious chemical, mechanical, or thermal stimuli, in a subject, e.g., a mammal such as a human. In mammals, the initial detection of noxious chemical, mechanical, or thermal stimuli, a process referred to as “nociception”, occurs predominantly at the peripheral terminals of specialized, small diameter sensory neurons. These sensory neurons transmit the information to the central nervous system, evoking a perception of pain or discomfort and initiating appropriate protective reflexes. The TWIK-8 molecules of the present invention may be present on these sensory neurons and, thus, may be involved in detecting these noxious chemical, mechanical, or thermal stimuli and transducing this information into membrane depolarization events. Thus, the TWIK-8 molecules by participating in pain signaling mechanisms, may modulate pain elicitation and act as targets for developing novel diagnostic targets and therapeutic agents to control pain. Examples of pain disorders include headache posttherapeutic neuralgia, diabetic neuropathy, postmastectomy pain syndrome, stump pain, reflex sympathetic dystrophy, trigeminal neuralgia, neuropathic pain, orofacial neuropathic pain, osteoarthritis, arthritis, e.g., rheumatoid arthritis, fibromyalgia syndrome, tension myalgia, Guillian-Barre syndrome, Meralgia paraesthetica, burning mouth syndrome, fibrocitis, myofascial pain syndrome, idiopathic pain disorder, temporomandibular joint syndrome, atypical odontalgia, loin pain, haematuria syndrome, non-cardiac chest pain, back pain, chronic nonspecific pain, pain associated with surgery, psychogenic pain, tooth pain, musculoskeletal pain disorder, chronic pelvic pain, nonorganic chronic headache, tension-type headache, cluster headache, migraine, complex regional pain syndrome, vaginismus, nerve trunk pain, somatoform pain disorder, cyclical mastalgia, chronic fatigue syndrome, multiple somatization syndrome, chronic pain disorder, cancer pain, somatization disorder, Syndrome X, facial pain, idiopathic pain disorder, posttraumatic rheumatic pain modulation disorder (fibrositis syndrome), hyperalgesia, and Tangier disease.

[0976] Potassium channel disorders also include cellular proliferation, growth, differentiation, or migration disorders. Cellular proliferation, growth, differentiation, or migration disorders include those disorders that affect cell proliferation, growth, differentiation, or migration processes. As used herein, a “cellular proliferation, growth, differentiation, or migration process” is a process by which a cell increases in number, size or content, by which a cell develops a specialized set of characteristics which differ from that of other cells, or by which a cell moves closer to or further from a particular location or stimulus. The TWIK-8 molecules of the present invention are involved in signal transduction mechanisms, which are known to be involved in cellular growth, differentiation, and migration processes. Thus, the TWIK-8 molecules may modulate cellular growth, differentiation, or migration, and may play a role in disorders characterized by aberrantly regulated growth, differentiation, or migration. Such disorders include cancer, e.g., carcinoma, sarcoma, or leukemia; tumor angiogenesis and metastasis; skeletal dysplasia; neuronal deficiencies resulting from impaired neural induction and patterning; and hematopoietic and/or myeloproliferative disorders.

[0977] TWIK-8-associated or related disorders also include disorders of tissues in which TWIK-8 protein is expressed, e.g., cortex, hypothalamus and dorsal root ganglia.

[0978] As used herein, a “potassium channel mediated activity” includes an activity which involves a potassium channel, e.g., a potassium channel in a neuronal cell, or a muscle cell (e.g., a cardiac muscle cell), associated with receiving, conducting, and transmitting signals in, for example, the nervous system. Potassium channel mediated activities include release of neurotransmitters, e.g., dopamine or norepinephrine, from cells, e.g., neuronal cells; modulation of resting potential of membranes, wave forms and frequencies of action potentials, and thresholds of excitation; and modulation of processes such as integration of sub-threshold synaptic responses, the conductance of back-propagating action potentials in, for example, neuronal cells or muscle cells, participation in signal transduction pathways, and participation in nociception.

[0979] The term “family” when referring to the protein and nucleic acid molecules of the invention is intended to mean two or more proteins or nucleic acid molecules having a common structural domain or motif and having sufficient amino acid or nucleotide sequence homology as defined herein. Such family members can be naturally or non-naturally occurring and can be from either the same or different species. For example, a family can contain a first protein of human origin, as well as other, distinct proteins of human origin or alternatively, can contain homologues of non-human origin, e.g., monkey proteins. Members of a family may also have common functional characteristics.

[0980] For example, the family of TWIK-8 proteins comprises at least one “transmembrane domain” and preferably six transmembrane domains. As used herein, the term “transmembrane domain” includes an amino acid sequence of about 15 amino acid residues in length which spans the plasma membrane. More preferably, a transmembrane domain includes about at least 20, 25, 30, 35, 40, or 45 amino acid residues and spans the plasma membrane. Transmembrane domains are rich in hydrophobic residues, and typically have an alpha-helical structure. In a preferred embodiment, at least 50%, 60%, 70%, 80%, 90%, 95% or more of the amino acids of a transmembrane domain are hydrophobic, e.g., leucines, isoleucines, tyrosines, or tryptophans. Transmembrane domains are described in, for example, Zagotta W. N. et al. (1996) Annual Rev. Neurosci. 19: 235-263, the contents of which are incorporated herein by reference. Amino acid residues 32-50, 116-137, 144-165, 195-219, 226-242, and 260-283 of the native TWIK-8 protein, and amino acid residues 70-91, 98-119, 149-173, 180-196 and 214-237 of the mature TWIK-8 protein are predicted to comprise transmembrane domains (see FIG. 21). Accordingly, TWIK-8 proteins having at least 50-60% homology, preferably about 60-70%, more preferably about 70-80%, or about 80-90% homology with a transmembrane domain of human TWIK-8 are within the scope of the invention.

[0981] In another embodiment, a TWIK-8 molecule of the present invention is identified based on the presence of a Pore loop (P-loop). As used herein, the term “Pore loop” or “P-loop” includes an amino acid sequence of about 15-45 amino acid residues in length, preferably about 15-35 amino acid residues in length, and most preferably about 15-25 amino acid residues in length, which is involved in lining the potassium channel pore. A P-loop is typically found between transmembrane domains of potassium channels and is believed to be a major determinant of ion selectivity in potassium channels. Preferably, P-loops contain a G-[HYDROPHOBIC AMINO ACID]-G sequence, e.g., a GYG, GLG, or GFG sequence. P-loops are described in, for example, Warmke et al. (1991) Science 252:1560-1562; Zagotta W. N. et al., (1996) Annual Rev. Neurosci. 19:235-63 (Pongs, O. (1993) J. Membr. Biol., 136, 1-8; Heginbotham et al. (1994) Biophys. J. 66,1061-1067; Mackinnon, R. (1995) Neuron, and 14, 889-892; Pascual et al., (1995) Neuron., 14, 1055-1063), the contents of which are incorporated herein by reference. Amino acid residues 243-259 of the native human TWIK-8 protein, and residues 197-213 of the predicted mature human TWIK-8 protein comprise a P-loop.

[0982] In a preferred embodiment, the TWIK-8 molecules of the invention include at least one and, preferably, six transmembrane domains and at least one P-loop domain.

[0983] In another embodiment, a TWIK-8 molecule of the present invention is identified based on the presence of a “seven-transmembrane receptor domain” in the protein or corresponding nucleic acid molecule. Seven-transmembrane receptor domains are described, for example, in Hamann et al. (1996) Genomics 32: 144-147. As used herein, the term “seven-transmembrane receptor domain” includes a protein domain having an amino acid sequence of about 150-320 amino acid residues. Preferably, a seven-transmembrane receptor domain includes at least about 200-250, or more preferably about 220 amino acid residues. To identify the presence of a seven-transmembrane receptor domain in a TWIK-8 protein, and to make the determination that a protein of interest has a particular profile, the amino acid sequence of the protein is searched against a database of known protein domains (e.g., the HMM database). The seven-transmembrane receptor domain (HMM) has been assigned the PFAM Accession PF00002 (http://genome.wustl.edu/Pfam/html). A search was performed against the HMM database resulting in the identification of a seven-transmembrane receptor domain in the amino acid sequence of human TWIK-8 (SEQ ID NO:29) at about residues 25-244 of SEQ ID NO:29. The results of the search are set forth in FIG. 22.

[0984] In another embodiment, a TWIK-8 molecule of the present invention is identified based on the presence of a “cyclic nucleotide-gated channel domain” in the protein or corresponding nucleic acid molecule. Cyclic nucleotide-gated channel domains are described, for example, in Yau (1994) Proc. Natl. Acad. Sci. USA 91: 3481-3483. As used herein, the term “cyclic nucleotide-gated channel domain” includes a protein domain having an amino acid sequence of about 100-225 amino acid residues. Preferably, a cyclic nucleotide-gated channel domain includes at least about 150-200, or more preferably about 178 amino acid residues. To identify the presence of a cyclic nucleotide-gated channel domain in a TWIK-8 protein, and to make the determination that a protein of interest has a particular profile, the amino acid sequence of the protein is searched against a database of known protein domains (e.g., the HMM database). The cyclic nucleotide-gated channel domain (HMM) has been assigned the PFAM Accession PF00914 (http:H/genome.wustl.edu/Pfam/html). A search was performed against the HMM database resulting in the identification of a cyclic nucleotide-gated channel domain in the amino acid sequence of human TWIK-8 (SEQ ID NO:29) at about residues 27-204 of SEQ ID NO:29. The results of the search are set forth in FIG. 22.

[0985] In another embodiment, a TWIK-8 molecule of the present invention is identified based on the presence of a “TRAAK potassium channel domain” in the protein or corresponding nucleic acid molecule. As used herein, the term “TRAAK potassium channel domain” includes a protein domain having an amino acid sequence of about 20-150 amino acid residues and having a bit score for the alignment of the sequence to the TRAAK potassium channel domain of at least 115-175. Preferably, a TRAAK potassium channel domain includes at least about 23-100, or more preferably about 25, 55, or 95 amino acid residues, and has a bit score for the alignment of the sequence to the TRAAK potassium channel domain of at least 20, 30, 40, 50, 60, 70, 80, 90, 100, 110 or higher. The TRAAK potassium channel domain has been assigned ProDom entries 73512, 98483, and 105542. To identify the presence of a TRAAK potassium channel domain in a TWIK-8 protein, and to make the determination that a protein of interest has a particular profile, the amino acid sequence of the protein is searched against a database of known protein domains (e.g., the ProDom database) using the default parameters (available at http://www.toulouse.inra.fr/prodom.html). A search was performed against the ProDom database resulting in the identification of a TRAAK potassium channel domains in the amino acid sequence of human TWIK-8 (SEQ ID NO:29) at about residues 50-104, 175-199, and 288-382 of SEQ ID NO:29. The results of the search are set forth in FIGS. 23A-H.

[0986] In another embodiment, a TWIK-8 molecule of the present invention is identified based on the presence of a “potassium channel protein domain” in the protein or corresponding nucleic acid molecule. As used herein, the term “potassium channel protein domain” includes a protein domain having an amino acid sequence of about 20-100 amino acid residues and having a bit score for the alignment of the sequence to the potassium channel protein domain of at least 101. Preferably, a potassium channel protein domain includes at least about 40-75, or more preferably about 55 amino acid residues, and has a bit score for the alignment of the sequence to the potassium channel protein domain of at least 20, 30, 40, 50, 60, 70, 80, 90, 100, or higher. The potassium channel protein domain has been assigned ProDom entry 129403. To identify the presence of a potassium channel protein domain in a TWIK-8 protein, and to make the determination that a protein of interest has a particular profile, the amino acid sequence of the protein is searched against a database of known protein domains (e.g., the ProDom database) using the default parameters (available at http://www.toulouse.inra.fr/prodom.html). A search was performed against the ProDom database resulting in the identification of a potassium channel protein domain in the amino acid sequence of human TWIK-8 (SEQ ID NO:29) at about residues 99-153 of SEQ ID NO:29. The results of the search are set forth in FIGS. 23A-H.

[0987] In another embodiment, a TWIK-8 molecule of the present invention is identified based on the presence of a “voltage-gated potassium channel domain” in the protein or corresponding nucleic acid molecule. As used herein, the term “voltage-gated potassium channel domain” includes a protein domain having an amino acid sequence of about 20-100 amino acid residues and having a bit score for the alignment of the sequence to the potassium channel protein domain of at least 115. Preferably, a voltage-gated potassium channel domain includes at least about 40-75, or more preferably about 55 amino acid residues, and has a bit score for the alignment of the sequence to the voltage-gated potassium channel domain of at least 20, 30, 40, 50, 60, 70, 80, 90, 100, 110 or higher. The voltage-gated potassium channel domain has been assigned ProDom entry 36. To identify the presence of a voltage-gated potassium channel domain in a TWIK-8 protein, and to make the determination that a protein of interest has a particular profile, the amino acid sequence of the protein is searched against a database of known protein domains (e.g., the ProDom database) using the default parameters (available at http:H/www.toulouse.inra.fr/prodom.html). A search was performed against the ProDom database resulting in the identification of a voltage-gated potassium channel domain in the amino acid sequence of human TWIK-8 (SEQ ID NO:29) at about residues 102-168 of SEQ ID NO:29. The results of the search are set forth in FIGS. 23A-H.

[0988] In another embodiment, a TWIK-8 molecule of the present invention is identified based on the presence of an “outward-rectifier TOK1 potassium channel domain” in the protein or corresponding nucleic acid molecule. As used herein, the term “outward-rectifier TOK1 potassium channel domain” includes a protein domain having an amino acid sequence of about 25-100 amino acid residues and having a bit score for the alignment of the sequence to the outward-rectifier TOK1 potassium channel domain of at least 70. Preferably, an outward-rectifier TOK1 potassium channel domain includes at least about 40-75, or more preferably about 56 amino acid residues, and has a bit score for the alignment of the sequence to the aoutward-rectifier TOK1 potassium channel domain of at least 20, 30, 40, 50, 60, or higher. The outward-rectifier TOK1 potassium channel domain has been assigned ProDom entry 32818. To identify the presence of an outward-rectifier TOK1 potassium channel domain in a TWIK-8 protein, and to make the determination that a protein of interest has a particular profile, the amino acid sequence of the protein is searched against a database of known protein domains (e.g., the ProDom database) using the default parameters (available at http://www.toulouse.inra.fr/prodom.html). A search was performed against the ProDom database resulting in the identification of an outward-rectifier TOK1 potassium channel domain in the amino acid sequence of human TWIK-8 (SEQ ID NO:29) at about residues 215-270 of SEQ ID NO:29. The results of the search are set forth in FIGS. 23A-H.

[0989] In another embodiment, a TWIK-8 molecule of the present invention is identified based on the presence of a “potassium channel subunit domain” in the protein or corresponding nucleic acid molecule. As used herein, the term “potassium channel subunit domain” includes a protein domain having an amino acid sequence of about 25-125 amino acid residues and having a bit score for the alignment of the sequence to the potassium channel subunit domain of at least 156. Preferably, a potassium channel subunit domain includes at least about 40-100, or more preferably about 72 amino acid residues, and has a bit score for the alignment of the sequence to the potassium channel subunit domain of at least 20, 30, 40, 50, 60, or higher. The potassium channel subunit domain has been assigned ProDom entry 1641. To identify the presence of a potassium channel subunit domain in a TWIK-8 protein, and to make the determination that a protein of interest has a particular profile, the amino acid sequence of the protein is searched against a database of known protein domains (e.g., the ProDom database) using the default parameters (available at http://www.toulouse.inra.fr/prodom.html). A search was performed against the ProDom database resulting in the identification of a potassium channel subunit domain in the amino acid sequence of human TWIK-8 (SEQ ID NO:29) at about residues 216-287 of SEQ ID NO:29. The results of the search are set forth in FIGS. 23A-H.

[0990] Isolated proteins of the present invention, preferably TWIK-8 proteins, have an amino acid sequence sufficiently identical to the amino acid sequence of SEQ ID NO:29 or are encoded by a nucleotide sequence sufficiently identical to SEQ ID NO:28 or 30. As used herein, the term “sufficiently identical” refers to a first amino acid or nucleotide sequence which contains a sufficient or minimum number of identical or equivalent (e.g., an amino acid residue which has a similar side chain) amino acid residues or nucleotides to a second amino acid or nucleotide sequence such that the first and second amino acid or nucleotide sequences share common structural domains or motifs and/or a common functional activity. For example, amino acid or nucleotide sequences which share common structural domains have at least 30%, 40%, or 50% homology, preferably 60% homology, more preferably 70%-80%, and even more preferably 90-95% homology across the amino acid sequences of the domains and contain at least one and preferably two structural domains or motifs, are defined herein as sufficiently identical. Furthermore, amino acid or nucleotide sequences which share at least 30%, 40%, or 50%, preferably 60%, more preferably 70-80%, or 90-95% homology and share a common functional activity are defined herein as sufficiently identical.

[0991] As used interchangeably herein, an “TWIK-8 activity”, “biological activity of TWIK-8” or “functional activity of TWIK-8”, refers to an activity exerted by a TWIK-8 protein, polypeptide or nucleic acid molecule on a TWIK-8 responsive cell or tissue, or on a TWIK-8 protein substrate, as determined in vivo, or in vitro, according to standard techniques. In one embodiment, a TWIK-8 activity is a direct activity, such as an association with a TWIK-8-target molecule. As used herein, a “target molecule” or “binding partner” is a molecule with which a TWIK-8 protein binds or interacts in nature, such that TWIK-8-mediated function is achieved. A TWIK-8 target molecule can be a non-TWIK-8 molecule or a TWIK-8 protein or polypeptide of the present invention. In an exemplary embodiment, a TWIK-8 target molecule is a TWIK-8 ligand, e.g., a potassium channel pore-forming subunit or a potassium channel ligand. Alternatively, a TWIK-8 activity is an indirect activity, such as a cellular signaling activity mediated by interaction of the TWIK-8 protein with a TWIK-8 ligand. The biological activities of TWIK-8 are described herein. For example, the TWIK-8 proteins of the present invention can have one or more of the following activities: (1) interacting with a non-TWIK protein molecule; (2) activating a TWIK-dependent signal transduction pathway; (3) modulating the release of neurotransmitters; (4) modulating membrane excitability; (5) influencing the resting potential of membranes, wave forms and frequencies of action potentials, and thresholds of excitation, (6) modulating processes which underlie learning and memory, such as integration of sub-threshold synaptic responses and the conductance of back-propagating action potentials, and (7) mediating nociception.

[0992] Accordingly, another embodiment of the invention features isolated TWIK-8 proteins and polypeptides having a TWIK-8 activity. Preferred proteins are TWIK-8 proteins having at least one or more of the following domains: a transmembrane domain, a pore loop domain, a seven-transmembrane receptor domain, a cyclic nucleotide-gated channel domain, a TRAAK potassium channel domain, a potassium channel protein domain, a voltage-gated potassium channel domain, a potassium channel subunit domain, and an outward-rectifier TOK1 potassium channel domain, and, preferably, a TWIK-8 activity.

[0993] Additional preferred proteins have at least one or more of the following domains: a transmembrane domain, a pore loop domain, a seven-transmembrane receptor domain, a cyclic nucleotide-gated channel domain, a TRAAK potassium channel domain, a potassium channel protein domain, a voltage-gated potassium channel domain, a potassium channel subunit domain, and an outward-rectifier TOK1 potassium channel domain, and are, preferably, encoded by a nucleic acid molecule having a nucleotide sequence which hybridizes under stringent hybridization conditions to a nucleic acid molecule comprising the nucleotide sequence of SEQ ID NO:28 or 30.

[0994] The nucleotide sequence of the isolated human TWIK-8 cDNA and the predicted amino acid sequence of the human TWIK-8 polypeptide are shown in FIG. 19 and in SEQ ID NOs:28 and 29, respectively. A plasmid containing the nucleotide sequence encoding human TWIK-8 was deposited with the American Type Culture Collection (ATCC), 10801 University Boulevard, Manassas, Va. 20110-2209, on and assigned Accession Number ______. This deposit will be maintained under the terms of the Budapest Treaty on the International Recognition of the Deposit of Microorganisms for the Purposes of Patent Procedure. This deposit was made merely as a convenience for those of skill in the art and is not an admission that a deposit is required under 35 U.S.C. §112.

[0995] The human TWIK-8 gene, which is approximately 1408 nucleotides in length, encodes a protein having a molecular weight of approximately 46.1 kD and which is approximately 419 amino acid residues in length.

[0996] Various aspects of the invention are described in further detail in the following subsections:

[0997] I. Isolated Nucleic Acid Molecules

[0998] One aspect of the invention pertains to isolated nucleic acid molecules that encode TWIK-8 proteins or biologically active portions thereof, as well as nucleic acid fragments sufficient for use as hybridization probes to identify TWIK-8-encoding nucleic acid molecules (e.g., TWIK-8 mRNA) and fragments for use as PCR primers for the amplification or mutation of TWIK-8 nucleic acid molecules. As used herein, the term “nucleic acid molecule” is intended to include DNA molecules (e.g., cDNA or genomic DNA) and RNA molecules (e.g., mRNA) and analogs of the DNA or RNA generated using nucleotide analogs. The nucleic acid molecule can be single-stranded or double-stranded, but preferably is double-stranded DNA.

[0999] The term “isolated nucleic acid molecule” includes nucleic acid molecules which are separated from other nucleic acid molecules which are present in the natural source of the nucleic acid. For example, with regards to genomic DNA, the term “isolated” includes nucleic acid molecules which are separated from the chromosome with which the genomic DNA is naturally associated. Preferably, an “isolated” nucleic acid is free of sequences which naturally flank the nucleic acid (i.e., sequences located at the 5′ and 3′ ends of the nucleic acid) in the genomic DNA of the organism from which the nucleic acid is derived. For example, in various embodiments, the isolated TWIK-8 nucleic acid molecule can contain less than about 5 kb, 4 kb, 3 kb, 2 kb, 1 kb, 0.5 kb or 0.1 kb of nucleotide sequences which naturally flank the nucleic acid molecule in genomic DNA of the cell from which the nucleic acid is derived. Moreover, an “isolated” nucleic acid molecule, such as a cDNA molecule, can be substantially free of other cellular material, or culture medium when produced by recombinant techniques, or substantially free of chemical precursors or other chemicals when chemically synthesized.

[1000] A nucleic acid molecule of the present invention, e.g., a nucleic acid molecule having the nucleotide sequence of SEQ ID NO:28 or 30, or the nucleotide sequence of the DNA insert of the plasmid deposited with ATCC as Accession Number ______, or a portion thereof, can be isolated using standard molecular biology techniques and the sequence information provided herein. Using all or portion of the nucleic acid sequence of SEQ ID NO:28 or 30, or the nucleotide sequence of the DNA insert of the plasmid deposited with ATCC as Accession Number ______, as a hybridization probe, TWIK-8 nucleic acid molecules can be isolated using standard hybridization and cloning techniques (e.g., as described in Sambrook, J., Fritsh, E. F., and Maniatis, T. Molecular Cloning: A Laboratory Manual. 2nd, ed., Cold Spring Harbor Laboratory, Cold Spring Harbor Laboratory Press, Cold Spring Harbor, N.Y., 1989).

[1001] Moreover, a nucleic acid molecule encompassing all or a portion of SEQ ID NO:28 or 30, or the nucleotide sequence of the DNA insert of the plasmid deposited with ATCC as Accession Number ______ can be isolated by the polymerase chain reaction (PCR) using synthetic oligonucleotide primers designed based upon the sequence of SEQ ID NO:28 or 30, or the nucleotide sequence of the DNA insert of the plasmid deposited with ATCC as Accession Number ______.

[1002] A nucleic acid of the invention can be amplified using cDNA, mRNA or alternatively, genomic DNA, as a template and appropriate oligonucleotide primers according to standard PCR amplification techniques. The nucleic acid so amplified can be cloned into an appropriate vector and characterized by DNA sequence analysis. Furthermore, oligonucleotides corresponding to TWIK-8 nucleotide sequences can be prepared by standard synthetic techniques, e.g., using an automated DNA synthesizer.

[1003] In a preferred embodiment, an isolated nucleic acid molecule of the invention comprises the nucleotide sequence shown in SEQ ID NO:28. The sequence of SEQ ID NO:28 corresponds to the human TWIK-8 cDNA. This cDNA comprises sequences encoding the human TWIK-8 protein (i.e., “the coding region”, from nucleotides 84-1343), as well as 5′ untranslated sequences (nucleotides 1-83) and 3′ untranslated sequences (nucleotides 1344-1408). Alternatively, the nucleic acid molecule can comprise only the coding region of SEQ ID NO:28 (e.g., nucleotides 84-1343, corresponding to SEQ ID NO:30).

[1004] In another preferred embodiment, an isolated nucleic acid molecule of the invention comprises a nucleic acid molecule which is a complement of the nucleotide sequence shown in SEQ ID NO:28 or 30, or the nucleotide sequence of the DNA insert of the plasmid deposited with ATCC as Accession Number ______, or a portion of any of these nucleotide sequences. A nucleic acid molecule which is complementary to the nucleotide sequence shown in SEQ ID NO:28 or 30, or the nucleotide sequence of the DNA insert of the plasmid deposited with ATCC as Accession Number ______, is one which is sufficiently complementary to the nucleotide sequence shown in SEQ ID NO:28 or 30, or the nucleotide sequence of the DNA insert of the plasmid deposited with ATCC as Accession Number ______, such that it can hybridize to the nucleotide sequence shown in SEQ ID NO:28 or 30, or the nucleotide sequence of the DNA insert of the plasmid deposited with ATCC as Accession Number ______, thereby forming a stable duplex.

[1005] In still another preferred embodiment, an isolated nucleic acid molecule of the present invention comprises a nucleotide sequence which is at least about 50%, 55%, 60%, 65%, 70%, 75%, 80%, 85%, 90%, 91%, 92%, 93%, 94%, 95%, 96%, 97%, 98%, 99% or more identical to the entire length of the nucleotide sequence shown in SEQ ID NO:28 or 30, or the entire length of the nucleotide sequence of the DNA insert of the plasmid deposited with ATCC as Accession Number ______, or a portion of any of these nucleotide sequences.

[1006] Moreover, the nucleic acid molecule of the invention can comprise only a portion of the nucleic acid sequence of SEQ ID NO:28 or 30, or the nucleotide sequence of the DNA insert of the plasmid deposited with ATCC as Accession Number ______, for example, a fragment which can be used as a probe or primer or a fragment encoding a portion of a TWIK-8 protein, e.g., a biologically active portion of a TWIK-8 protein. The nucleotide sequence determined from the cloning of the TWIK-8 gene allows for the generation of probes and primers designed for use in identifying and/or cloning other TWIK-8 family members, as well as TWIK-8 homologues from other species. The probe/primer typically comprises substantially purified oligonucleotide. The oligonucleotide typically comprises a region of nucleotide sequence that hybridizes under stringent conditions to at least about 12 or 15, preferably about 20 or 25, more preferably about 30, 35, 40, 45, 50, 55, 60, 65, 75, 80, 85, 90, 95, 100, 150, or 200 or more consecutive nucleotides of a sense sequence of SEQ ID NO:28 or 30, or the nucleotide sequence of the DNA insert of the plasmid deposited with ATCC as Accession Number ______, of an anti-sense sequence of SEQ ID NO:28 or 30, or the nucleotide sequence of the DNA insert of the plasmid deposited with ATCC as Accession Number ______, or of a naturally occurring allelic variant or mutant of SEQ ID NO:28 or 30, or the nucleotide sequence of the DNA insert of the plasmid deposited with ATCC as Accession Number ______. In one embodiment, a nucleic acid molecule of the present invention comprises a nucleotide sequence which is greater than 50, 100, 150, 200, 250, 300, 350, 400, 450, 500, 550, 600, 650, 700, 750, 800, 850, 900, 950, 1000, 1050, 1100, 1150, 1200, 1250, 1300, 1350, 1400, 1450, 1500 or more nucleotides in length and hybridizes under stringent hybridization conditions to a nucleic acid molecule of SEQ ID NO:28 or 30, or the nucleotide sequence of the DNA insert of the plasmid deposited with ATCC as Accession Number ______.

[1007] Probes based on the TWIK-8 nucleotide sequences can be used to detect transcripts or genomic sequences encoding the same or homologous proteins. In preferred embodiments, the probe further comprises a label group attached thereto, e.g., the label group can be a radioisotope, a fluorescent compound, an enzyme, or an enzyme co-factor. Such probes can be used as a part of a diagnostic test kit for identifying cells or tissue which misexpress a TWIK-8 protein, such as by measuring a level of a TWIK-8-encoding nucleic acid in a sample of cells from a subject e.g., detecting TWIK-8 mRNA levels or determining whether a genomic TWIK-8 gene has been mutated or deleted.

[1008] A nucleic acid fragment encoding a “biologically active portion of a TWIK-8 protein” can be prepared by isolating a portion of the nucleotide sequence of SEQ ID NO:28 or 30, or the nucleotide sequence of the DNA insert of the plasmid deposited with ATCC as Accession Number ______, which encodes a polypeptide having a TWIK-8 biological activity (the biological activities of the TWIK-8 proteins are described herein), expressing the encoded portion of the TWIK-8 protein (e.g., by recombinant expression in vitro) and assessing the activity of the encoded portion of the TWIK-8 protein.

[1009] The invention further encompasses nucleic acid molecules that differ from the nucleotide sequence shown in SEQ ID NO:28 or 30, or the nucleotide sequence of the DNA insert of the plasmid deposited with ATCC as Accession Number ______, due to degeneracy of the genetic code and thus encode the same TWIK-8 proteins as those encoded by the nucleotide sequence shown in SEQ ID NO:28 or 30, or the nucleotide sequence of the DNA insert of the plasmid deposited with ATCC as Accession Number ______. In another embodiment, an isolated nucleic acid molecule of the invention has a nucleotide sequence encoding a protein having an amino acid sequence shown in SEQ ID NO:29.

[1010] In addition to the TWIK-8 nucleotide sequences shown in SEQ ID NO:28 or 30, or the nucleotide sequence of the DNA insert of the plasmid deposited with ATCC as Accession Number ______, it will be appreciated by those skilled in the art that DNA sequence polymorphisms that lead to changes in the amino acid sequences of the TWIK-8 proteins may exist within a population (e.g., the human population). Such genetic polymorphism in the TWIK-8 genes may exist among individuals within a population due to natural allelic variation. As used herein, the terms “gene” and “recombinant gene” refer to nucleic acid molecules which include an open reading frame encoding a TWIK-8 protein, preferably a mammalian TWIK-8 protein, and can further include non-coding regulatory sequences, and introns.

[1011] Allelic variants of human TWIK-8 include both functional and non-functional TWIK-8 proteins. Functional allelic variants are naturally occurring amino acid sequence variants of the human TWIK-8 protein that maintain the ability to bind a TWIK-8 ligand or substrate and/or modulate pain signaling mechanisms, membrane excitability or neurotransmitter release. Functional allelic variants will typically contain only conservative substitution of one or more amino acids of SEQ ID NO:29, or substitution, deletion or insertion of non-critical residues in non-critical regions of the protein.

[1012] Non-functional allelic variants are naturally occurring amino acid sequence variants of the human TWIK-8 protein that do not have the ability to either bind a TWIK-8 ligand and/or modulate any of the TWIK-8 activities described herein. Non-functional allelic variants will typically contain a non-conservative substitution, a deletion, or insertion or premature truncation of the amino acid sequence of SEQ ID NO:29, or a substitution, insertion or deletion in critical residues or critical regions.

[1013] The present invention further provides non-human orthologues of the human TWIK-8 protein. Orthologues of the human TWIK-8 protein are proteins that are isolated from non-human organisms and possess the same TWIK-8 ligand binding and/or modulation of membrane excitability activities of the human TWIK-8 protein. Orthologues of the human TWIK-8 protein can readily be identified as comprising an amino acid sequence that is substantially identical to SEQ ID NO:29.

[1014] Moreover, nucleic acid molecules encoding other TWIK-8 family members and, thus, which have a nucleotide sequence which differs from the TWIK-8 sequences of SEQ ID NO:28 or 30, or the nucleotide sequence of the DNA insert of the plasmid deposited with ATCC as Accession Number ______ are intended to be within the scope of the invention. For example, another TWIK-8 cDNA can be identified based on the nucleotide sequence of human TWIK-8. Moreover, nucleic acid molecules encoding TWIK-8 proteins from different species, and which, thus, have a nucleotide sequence which differs from the TWIK-8 sequences of SEQ ID NO:28 or 30, or the nucleotide sequence of the DNA insert of the plasmid deposited with ATCC as Accession Number ______ are intended to be within the scope of the invention. For example, a mouse TWIK-8 cDNA can be identified based on the nucleotide sequence of a human TWIK-8.

[1015] Nucleic acid molecules corresponding to natural allelic variants and homologues of the TWIK-8 cDNAs of the invention can be isolated based on their homology to the TWIK-8 nucleic acids disclosed herein using the cDNAs disclosed herein, or a portion thereof, as a hybridization probe according to standard hybridization techniques under stringent hybridization conditions. Nucleic acid molecules corresponding to natural allelic variants and homologues of the TWIK-8 cDNAs of the invention can further be isolated by mapping to the same chromosome or locus as the TWIK-8 gene.

[1016] Accordingly, in another embodiment, an isolated nucleic acid molecule of the invention is at least 15, 20, 25, 30 or more nucleotides in length and hybridizes under stringent conditions to the nucleic acid molecule comprising the nucleotide sequence of SEQ ID NO:28 or 30, or the nucleotide sequence of the DNA insert of the plasmid deposited with ATCC as Accession Number ______. In other embodiment, the nucleic acid is at least 950-1000, 1000-1100, 1100-1200, 1200-1300, 1300-1400, 1400-1500 or more nucleotides in length.

[1017] As used herein, the term “hybridizes under stringent conditions” is intended to describe conditions for hybridization and washing under which nucleotide sequences that are significantly identical or homologous to each other remain hybridized to each other. Preferably, the conditions are such that sequences at least about 70%, more preferably at least about 80%, even more preferably at least about 85% or 90% identical to each other remain hybridized to each other. Such stringent conditions are known to those skilled in the art and can be found in Current Protocols in Molecular Biology, Ausubel et al., eds., John Wiley & Sons, Inc. (1995), sections 2, 4 and 6. Additional stringent conditions can be found in Molecular Cloning: A Laboratory Manual, Sambrook et al., Cold Spring Harbor Press, Cold Spring Harbor, N.Y. (1989), chapters 7, 9 and 11. A preferred, non-limiting example of stringent hybridization conditions includes hybridization in 4×sodium chloride/sodium citrate (SSC), at about 65-70° C. (or hybridization in 4×SSC plus 50% formamide at about 42-50° C.) followed by one or more washes in 1×SSC, at about 65-70° C. A preferred, non-limiting example of highly stringent hybridization conditions includes hybridization in 1×SSC, at about 65-70° C. (or hybridization in 1×SSC plus 50% formamide at about 42-50° C.) followed by one or more washes in 0.3×SSC, at about 65-70° C. A preferred, non-limiting example of reduced stringency hybridization conditions includes hybridization in 4×SSC, at about 50-60° C. (or alternatively hybridization in 6×SSC plus 50% formamide at about 40-45° C.) followed by one or more washes in 2×SSC, at about 50-60° C. Ranges intermediate to the above-recited values, e.g., at 65-70° C. or at 42-50° C. are also intended to be encompassed by the present invention. SSPE (1×SSPE is 0.15M NaCl, 10 mM NaH₂PO₄, and 1.25 mM EDTA, pH 7.4) can be substituted for SSC (1×SSC is 0.15M NaCl and 15 mM sodium citrate) in the hybridization and wash buffers; washes are performed for 15 minutes each after hybridization is complete. The hybridization temperature for hybrids anticipated to be less than 50 base pairs in length should be 5-10° C. less than the melting temperature (Tₘ) of the hybrid, where Tₘ is determined according to the following equations. For hybrids less than 18 base pairs in length, Tₘ(° C.)=2(# of A+T bases)+4(# of G+C bases). For hybrids between 18 and 49 base pairs in length, Tₘ(° C.)=81.5+16.6(log₁₀[Na⁺])+0.41(% G+C)−(600/N), where N is the number of bases in the hybrid, and [Na⁺] is the concentration of sodium ions in the hybridization buffer ([Na⁺] for 1×SSC=0.165 M). It will also be recognized by the skilled practitioner that additional reagents may be added to hybridization and/or wash buffers to decrease non-specific hybridization of nucleic acid molecules to membranes, for example, nitrocellulose or nylon membranes, including but not limited to blocking agents (e.g., BSA or salmon or herring sperm carrier DNA), detergents (e.g., SDS), chelating agents (e.g., EDTA), Ficoll, PVP and the like. When using nylon membranes, in particular, an additional preferred, non-limiting example of stringent hybridization conditions is hybridization in 0.25-0.5M NaH₂PO₄, 7% SDS at about 65° C., followed by one or more washes at 0.02M NaH₂PO₄, 1% SDS at 65° C., see e.g., Church and Gilbert (1984) Proc. Natl. Acad. Sci. USA 81:1991-1995, (or alternatively 0.2×SSC, 1% SDS).

[1018] Preferably, an isolated nucleic acid molecule of the invention that hybridizes under stringent conditions to the sequence of SEQ ID NO:28 or 30 and corresponds to a naturally-occurring nucleic acid molecule. As used herein, a “naturally-occurring” nucleic acid molecule refers to an RNA or DNA molecule having a nucleotide sequence that occurs in nature (e.g., encodes a natural protein).

[1019] In addition to naturally-occurring allelic variants of the TWIK-8 sequences that may exist in the population, the skilled artisan will further appreciate that changes can be introduced by mutation into the nucleotide sequences of SEQ ID NO:28 or 30, or the nucleotide sequence of the DNA insert of the plasmid deposited with ATCC as Accession Number ______, thereby leading to changes in the amino acid sequence of the encoded TWIK-8 proteins, without altering the functional ability of the TWIK-8 proteins. For example, nucleotide substitutions leading to amino acid substitutions at “non-essential” amino acid residues can be made in the sequence of SEQ ID NO:28 or 30, or the nucleotide sequence of the DNA insert of the plasmid deposited with ATCC as Accession Number ______. A “non-essential” amino acid residue is a residue that can be altered from the wild-type sequence of TWIK-8 (e.g., the sequence of SEQ ID NO:29) without altering the biological activity, whereas an “essential” amino acid residue is required for biological activity. For example, amino acid residues that are conserved among the TWIK-8 proteins of the present invention, e.g., those present in a transmembrane domain, are predicted to be particularly unamenable to alteration. Furthermore, additional amino acid residues that are conserved between the TWIK-8 proteins of the present invention and other members of the TWIK family are not likely to be amenable to alteration.

[1020] Accordingly, another aspect of the invention pertains to nucleic acid molecules encoding TWIK-8 proteins that contain changes in amino acid residues that are not essential for activity. Such TWIK-8 proteins differ in amino acid sequence from SEQ ID NO:29, yet retain biological activity. In one embodiment, the isolated nucleic acid molecule comprises a nucleotide sequence encoding a protein, wherein the protein comprises an amino acid sequence at least about 50%, 55%, 60%, 65%, 70%, 75%, 80%, 85%, 90%, 91%, 92%, 93%, 94%, 95%, 96%, 97%, 98%, 99% or more identical to SEQ ID NO:29.

[1021] An isolated nucleic acid molecule encoding a TWIK-8 protein identical to the protein of SEQ ID NO:29, can be created by introducing one or more nucleotide substitutions, additions or deletions into the nucleotide sequence of SEQ ID NO:28 or 30, or the nucleotide sequence of the DNA insert of the plasmid deposited with ATCC as Accession Number ______, such that one or more amino acid substitutions, additions or deletions are introduced into the encoded protein. Mutations can be introduced into SEQ ID NO:28 or 30, or the nucleotide sequence of the DNA insert of the plasmid deposited with ATCC as Accession Number ______ by standard techniques, such as site-directed mutagenesis and PCR-mediated mutagenesis. Preferably, conservative amino acid substitutions are made at one or more predicted non-essential amino acid residues. A “conservative amino acid substitution” is one in which the amino acid residue is replaced with an amino acid residue having a similar side chain. Families of amino acid residues having similar side chains have been defined in the art. These families include amino acids with basic side chains (e.g., lysine, arginine, histidine), acidic side chains (e.g., aspartic acid, glutamic acid), uncharged polar side chains (e.g., glycine, asparagine, glutamine, serine, threonine, tyrosine, cysteine), nonpolar side chains (e.g., alanine, valine, leucine, isoleucine, proline, phenylalanine, methionine, tryptophan), beta-branched side chains (e.g., threonine, valine, isoleucine) and aromatic side chains (e.g., tyrosine, phenylalanine, tryptophan, histidine). Thus, a predicted nonessential amino acid residue in a TWIK-8 protein is preferably replaced with another amino acid residue from the same side chain family. Alternatively, in another embodiment, mutations can be introduced randomly along all or part of a TWIK-8 coding sequence, such as by saturation mutagenesis, and the resultant mutants can be screened for TWIK-8 biological activity to identify mutants that retain activity. Following mutagenesis of SEQ ID NO:28 or 30, or the nucleotide sequence of the DNA insert of the plasmid deposited with ATCC as Accession Number ______, the encoded protein can be expressed recombinantly and the activity of the protein can be determined.

[1022] In a preferred embodiment, a mutant TWIK-8 protein can be assayed for the ability to (1) interact with a non-TWIK protein molecule; (2) activate a TWIK-dependent signal transduction pathway; (3) modulate the release of neurotransmitters; (4) modulate membrane excitability; (5) influence the resting potential of membranes, wave forms and frequencies of action potentials, and thresholds of excitation, (6) modulate processes which underlie learning and memory, such as integration of sub-threshold synaptic responses and the conductance of back-propagating action potentials, and (7) mediate nociception.

[1023] In addition to the nucleic acid molecules encoding TWIK-8 proteins described above, another aspect of the invention pertains to isolated nucleic acid molecules which are antisense thereto. An “antisense” nucleic acid comprises a nucleotide sequence which is complementary to a “sense” nucleic acid encoding a protein, e.g., complementary to the coding strand of a double-stranded cDNA molecule or complementary to an mRNA sequence. Accordingly, an antisense nucleic acid can hydrogen bond to a sense nucleic acid. The antisense nucleic acid can be complementary to an entire TWIK-8 coding strand, or to only a portion thereof. In one embodiment, an antisense nucleic acid molecule is antisense to a “coding region” of the coding strand of a nucleotide sequence encoding TWIK-8. The term “coding region” refers to the region of the nucleotide sequence comprising codons which are translated into amino acid residues (e.g., the coding region of human TWIK-8 corresponds to SEQ ID NO:30). In another embodiment, the antisense nucleic acid molecule is antisense to a “noncoding region” of the coding strand of a nucleotide sequence encoding TWIK-8. The term “noncoding region” refers to 5′ and 3′ sequences which flank the coding region that are not translated into amino acids (i.e., also referred to as 5′ and 3′ untranslated regions).

[1024] Given the coding strand sequences encoding TWIK-8 disclosed herein (e.g., SEQ ID NO:30), antisense nucleic acids of the invention can be designed according to the rules of Watson and Crick base pairing. The antisense nucleic acid molecule can be complementary to the entire coding region of TWIK-8 mRNA, but more preferably is an oligonucleotide which is antisense to only a portion of the coding or noncoding region of TWIK-8 mRNA. For example, the antisense oligonucleotide can be complementary to the region surrounding the translation start site of TWIK-8 mRNA. An antisense oligonucleotide can be, for example, about 5, 10, 15, 20, 25, 30, 35, 40, 45 or 50 nucleotides in length. An antisense nucleic acid of the invention can be constructed using chemical synthesis and enzymatic ligation reactions using procedures known in the art. For example, an antisense nucleic acid (e.g., an antisense oligonucleotide) can be chemically synthesized using naturally occurring nucleotides or variously modified nucleotides designed to increase the biological stability of the molecules or to increase the physical stability of the duplex formed between the antisense and sense nucleic acids, e.g., phosphorothioate derivatives and acridine substituted nucleotides can be used. Examples of modified nucleotides which can be used to generate the antisense nucleic acid include 5-fluorouracil, 5-bromouracil, 5-chlorouracil, 5-iodouracil, hypoxanthine, xantine, 4-acetylcytosine, 5-(carboxyhydroxylmethyl) uracil, 5-carboxymethylaminomethyl-2-thiouridine, 5-carboxymethylaminomethyluracil, dihydrouracil, beta-D-galactosylqueosine, inosine, N6-isopentenyladenine, 1-methylguanine, 1-methylinosine, 2,2-dimethylguanine, 2-methyladenine, 2-methylguanine, 3-methylcytosine, 5-methylcytosine, N6-adenine, 7-methylguanine, 5-methylaminomethyluracil, 5-methoxyaminomethyl-2-thiouracil, beta-D-mannosylqueosine, 5′-methoxycarboxymethyluracil, 5-methoxyuracil, 2-methylthio-N6-isopentenyladenine, uracil-5-oxyacetic acid (v), wybutoxosine, pseudouracil, queosine, 2-thiocytosine, 5-methyl-2-thiouracil, 2-thiouracil, 4-thiouracil, 5-methyluracil, uracil-5- oxyacetic acid methylester, uracil-5-oxyacetic acid (v), 5-methyl-2-thiouracil, 3-(3-amino-3-N-2-carboxypropyl) uracil, (acp3)w, and 2,6-diaminopurine. Alternatively, the antisense nucleic acid can be produced biologically using an expression vector into which a nucleic acid has been subcloned in an antisense orientation (i.e., RNA transcribed from the inserted nucleic acid will be of an antisense orientation to a target nucleic acid of interest, described further in the following subsection).

[1025] The antisense nucleic acid molecules of the invention are typically administered to a subject or generated in situ such that they hybridize with or bind to cellular mRNA and/or genomic DNA encoding a TWIK-8 protein to thereby inhibit expression of the protein, e.g., by inhibiting transcription and/or translation. The hybridization can be by conventional nucleotide complementarity to form a stable duplex, or, for example, in the case of an antisense nucleic acid molecule which binds to DNA duplexes, through specific interactions in the major groove of the double helix. An example of a route of administration of antisense nucleic acid molecules of the invention include direct injection at a tissue site. Alternatively, antisense nucleic acid molecules can be modified to target selected cells and then administered systemically. For example, for systemic administration, antisense molecules can be modified such that they specifically bind to receptors or antigens expressed on a selected cell surface, e.g., by linking the antisense nucleic acid molecules to peptides or antibodies which bind to cell surface receptors or antigens. The antisense nucleic acid molecules can also be delivered to cells using the vectors described herein. To achieve sufficient intracellular concentrations of the antisense molecules, vector constructs in which the antisense nucleic acid molecule is placed under the control of a strong pol II or pol III promoter are preferred.

[1026] In yet another embodiment, the antisense nucleic acid molecule of the invention is an α-anomeric nucleic acid molecule. An α-anomeric nucleic acid molecule forms specific double-stranded hybrids with complementary RNA in which, contrary to the usual β-units, the strands run parallel to each other (Gaultier et al. (1987) Nucleic Acids. Res. 15:6625-6641). The antisense nucleic acid molecule can also comprise a 2′-o-methylribonucleotide (Inoue et al. (1987) Nucleic Acids Res. 15:6131-6148) or a chimeric RNA-DNA analogue (Inoue et al. (1987) FEBS Lett. 215:327-330).

[1027] In still another embodiment, an antisense nucleic acid of the invention is a ribozyme. Ribozymes are catalytic RNA molecules with ribonuclease activity which are capable of cleaving a single-stranded nucleic acid, such as an mRNA, to which they have a complementary region. Thus, ribozymes (e.g., hammerhead ribozymes (described in Haseloff and Gerlach (1988) Nature 334:585-591)) can be used to catalytically cleave TWIK-8 mRNA transcripts to thereby inhibit translation of TWIK-8 mRNA. A ribozyme having specificity for a TWIK-8-encoding nucleic acid can be designed based upon the nucleotide sequence of a TWIK-8 cDNA disclosed herein (i.e., SEQ ID NO:28 or 30, or the nucleotide sequence of the DNA insert of the plasmid deposited with ATCC as Accession Number ______). For example, a derivative of a Tetrahymena L-19 IVS RNA can be constructed in which the nucleotide sequence of the active site is complementary to the nucleotide sequence to be cleaved in a TWIK-8-encoding mRNA. See, e.g., Cech et al. U.S. Pat. No. 4,987,071; and Cech et al. U.S. Pat. No. 5,116,742. Alternatively, TWIK-8 mRNA can be used to select a catalytic RNA having a specific ribonuclease activity from a pool of RNA molecules. See, e.g., Bartel, D. and Szostak, J. W. (1993) Science 261:1411-1418.

[1028] Alternatively, TWIK-8 gene expression can be inhibited by targeting nucleotide sequences complementary to the regulatory region of the TWIK-8 (e.g., the TWIK-8 promoter and/or enhancers; e.g., nucleotides 1-83 of SEQ ID NO:28) to form triple helical structures that prevent transcription of the TWIK-8 gene in target cells. See generally, Helene, C. (1991) Anticancer Drug Des. 6(6):569-84; Helene, C. et al. (1992) Ann. N.Y. Acad. Sci. 660:27-36; and Maher, L. J. (1992) Bioassays 14(12):807-15.

[1029] In yet another embodiment, the TWIK-8 nucleic acid molecules of the present invention can be modified at the base moiety, sugar moiety or phosphate backbone to improve, e.g., the stability, hybridization, or solubility of the molecule. For example, the deoxyribose phosphate backbone of the nucleic acid molecules can be modified to generate peptide nucleic acids (see Hyrup B. et al. (1996) Bioorganic & Medicinal Chemistry 4 (1): 5-23). As used herein, the terms “peptide nucleic acids” or “PNAs” refer to nucleic acid mimics, e.g., DNA mimics, in which the deoxyribose phosphate backbone is replaced by a pseudopeptide backbone and only the four natural nucleobases are retained. The neutral backbone of PNAs has been shown to allow for specific hybridization to DNA and RNA under conditions of low ionic strength. The synthesis of PNA oligomers can be performed using standard solid phase peptide synthesis protocols as described in Hyrup B. et al. (1996) supra; Perry-O'Keefe et al. Proc. Natl. Acad. Sci. 93: 14670-675.

[1030] PNAs of TWIK-8 nucleic acid molecules can be used in therapeutic and diagnostic applications. For example, PNAs can be used as antisense or antigene agents for sequence-specific modulation of gene expression by, for example, inducing transcription or translation arrest or inhibiting replication. PNAs of TWIK-8 nucleic acid molecules can also be used in the analysis of single base pair mutations in a gene, (e.g., by PNA-directed PCR clamping); as ‘artificial restriction enzymes’ when used in combination with other enzymes, (e.g., S1 nucleases (Hyrup B. (1996) supra)); or as probes or primers for DNA sequencing or hybridization (Hyrup B. et al. (1996) supra; Perry-O'Keefe supra).

[1031] In another embodiment, PNAs of TWIK-8 can be modified, (e.g., to enhance their stability or cellular uptake), by attaching lipophilic or other helper groups to PNA, by the formation of PNA-DNA chimeras, or by the use of liposomes or other techniques of drug delivery known in the art. For example, PNA-DNA chimeras of TWIK-8 nucleic acid molecules can be generated which may combine the advantageous properties of PNA and DNA. Such chimeras allow DNA recognition enzymes, (e.g., RNAse H and DNA polymerases), to interact with the DNA portion while the PNA portion would provide high binding affinity and specificity. PNA-DNA chimeras can be linked using linkers of appropriate lengths selected in terms of base stacking, number of bonds between the nucleobases, and orientation (Hyrup B. (1996) supra). The synthesis of PNA-DNA chimeras can be performed as described in Hyrup B. (1996) supra and Finn P. J. et al. (1996) Nucleic Acids Res. 24 (17): 3357-63. For example, a DNA chain can be synthesized on a solid support using standard phosphoramidite coupling chemistry and modified nucleoside analogs, e.g., 5′-(4-methoxytrityl)amino-5′-deoxy-thymidine phosphoramidite, can be used between the PNA and the 5′ end of DNA (Mag, M. et al. (1989) Nucleic Acid Res. 17: 5973-88). PNA monomers are then coupled in a stepwise manner to produce a chimeric molecule with a 5′ PNA segment and a 3′ DNA segment (Finn P. J. et al. (1996) supra). Alternatively, chimeric molecules can be synthesized with a 5′ DNA segment and a 3′ PNA segment (Peterser, K. H. et al. (1975) Bioorganic Med. Chem. Lett. 5: 1119-11124).

[1032] In other embodiments, the oligonucleotide may include other appended groups such as peptides (e.g., for targeting host cell receptors in vivo), or agents facilitating transport across the cell membrane (see, e.g., Letsinger et al. (1989) Proc. Natl. Acad. Sci. USA 86:6553-6556; Lemaitre et al. (1987) Proc. Natl. Acad. Sci. USA 84:648-652; PCT Publication No. W088/09810) or the blood-brain barrier (see, e.g., PCT Publication No. W089/10134). In addition, oligonucleotides can be modified with hybridization-triggered cleavage agents (See, e.g., Krol et al. (1988) Bio-Techniques 6:958-976) or intercalating agents. (See, e.g., Zon (1988) Pharm. Res. 5:539-549). To this end, the oligonucleotide may be conjugated to another molecule, (e.g., a peptide, hybridization triggered cross-linking agent, transport agent, or hybridization-triggered cleavage agent).

[1033] Alternatively, the expression characteristics of an endogenous TWIK-8 gene within a cell line or microorganism may be modified by inserting a heterologous DNA regulatory element into the genome of a stable cell line or cloned microorganism such that the inserted regulatory element is operatively linked with the endogenous TWIK-8 gene. For example, an endogenous TWIK-8 gene which is normally “transcriptionally silent”, i.e., a TWIK-8 gene which is normally not expressed, or is expressed only at very low levels in a cell line or microorganism, may be activated by inserting a regulatory element which is capable of promoting the expression of a normally expressed gene product in that cell line or microorganism. Alternatively, a transcriptionally silent, endogenous TWIK-8 gene may be activated by insertion of a promiscuous regulatory element that works across cell types.

[1034] A heterologous regulatory element may be inserted into a stable cell line or cloned microorganism, such that it is operatively linked with an endogenous TWIK-8 gene, using techniques, such as targeted homologous recombination, which are well known to those of skill in the art, and described, e.g., in Chappel, U.S. Pat. No. 5,272,071; PCT publication No. WO 91/06667, published May 16, 1991.

[1035] II. Isolated TWIK-8 Proteins and Anti-TWIK-8 Antibodies

[1036] One aspect of the invention pertains to isolated TWIK-8 proteins, and biologically active portions thereof, as well as polypeptide fragments suitable for use as immunogens to raise anti-TWIK-8 antibodies. In one embodiment, native TWIK-8 proteins can be isolated from cells or tissue sources by an appropriate purification scheme using standard protein purification techniques. In another embodiment, TWIK-8 proteins are produced by recombinant DNA techniques. Alternative to recombinant expression, a TWIK-8 protein or polypeptide can be synthesized chemically using standard peptide synthesis techniques.

[1037] An “isolated” or “purified” protein or biologically active portion thereof is substantially free of cellular material or other contaminating proteins from the cell or tissue source from which the TWIK-8 protein is derived, or substantially free from chemical precursors or other chemicals when chemically synthesized. The language “substantially free of cellular material” includes preparations of TWIK-8 protein in which the protein is separated from cellular components of the cells from which it is isolated or recombinantly produced. In one embodiment, the language “substantially free of cellular material” includes preparations of TWIK-8 protein having less than about 30% (by dry weight) of non-TWIK-8 protein (also referred to herein as a “contaminating protein”), more preferably less than about 20% of non-TWIK-8 protein, still more preferably less than about 10% of non-TWIK-8 protein, and most preferably less than about 5% non-TWIK-8 protein. When the TWIK-8 protein or biologically active portion thereof is recombinantly produced, it is also preferably substantially free of culture medium, i.e., culture medium represents less than about 20%, more preferably less than about 10%, and most preferably less than about 5% of the volume of the protein preparation.

[1038] The language “substantially free of chemical precursors or other chemicals” includes preparations of TWIK-8 protein in which the protein is separated from chemical precursors or other chemicals which are involved in the synthesis of the protein. In one embodiment, the language “substantially free of chemical precursors or other chemicals” includes preparations of TWIK-8 protein having less than about 30% (by dry weight) of chemical precursors or non-TWIK-8 chemicals, more preferably less than about 20% chemical precursors or non-TWIK-8 chemicals, still more preferably less than about 10% chemical precursors or non-TWIK-8 chemicals, and most preferably less than about 5% chemical precursors or non-TWIK-8 chemicals.

[1039] As used herein, a “biologically active portion” of a TWIK-8 protein includes a fragment of a TWIK-8 protein which participates in an interaction between a TWIK-8 molecule and a non-TWIK-8 molecule. Biologically active portions of a TWIK-8 protein include peptides comprising amino acid sequences sufficiently identical to or derived from the amino acid sequence of the TWIK-8 protein, e.g., the amino acid sequence shown in SEQ ID NO:29, which include less amino acids than the full length TWIK-8 proteins, and exhibit at least one activity of a TWIK-8 protein. Typically, biologically active portions comprise a domain or motif with at least one activity of the TWIK-8 protein, e.g., modulating membrane excitability. A biologically active portion of a TWIK-8 protein can be a polypeptide which is, for example, 25, 30, 35, 40, 45, 50, 75, 100, 125, 150, 175, 200 or more amino acids in length. Biologically active portions of a TWIK-8 protein can be used as targets for developing agents which modulate a TWIK-8 mediated activity, e.g., modulation of membrane excitability.

[1040] In one embodiment, a biologically active portion of a TWIK-8 protein comprises at least one or more of the following domains: a transmembrane domain, a pore loop domain, a seven-transmembrane receptor domain, a cyclic nucleotide-gated channel domain, a TRAAK potassium channel domain, a potassium channel protein domain, a voltage-gated potassium channel domain, a potassium channel subunit domain, and an outward-rectifier TOK1 potassium channel domain. It is to be understood that a preferred biologically active portion of a TWIK-8 protein of the present invention may contain at least one transmembrane domain and one or more of the following domains: a transmembrane domain, a pore loop domain, a seven-transmembrane receptor domain, a cyclic nucleotide-gated channel domain, a TRAAK potassium channel domain, a potassium channel protein domain, a voltage-gated potassium channel domain, a potassium channel subunit domain, and an outward-rectifier TOK1 potassium channel domain. Moreover, other biologically active portions, in which other regions of the protein are deleted, can be prepared by recombinant techniques and evaluated for one or more of the functional activities of a native TWIK-8 protein.

[1041] In a preferred embodiment, the TWIK-8 protein has an amino acid sequence shown in SEQ ID NO:29. In other embodiments, the TWIK-8 protein is substantially identical to SEQ ID NO:29, and retains the functional activity of the protein of SEQ ID NO:29, yet differs in amino acid sequence due to natural allelic variation or mutagenesis, as described in detail in subsection I above. Accordingly, in another embodiment, the TWIK-8 protein is a protein which comprises an amino acid sequence at least about 50%, 55%, 60%, 65%, 70%, 75%, 80%, 85%, 90%, 91%, 92%, 93%, 94%, 95%, 96%, 97%, 98%, 99% or more identical to SEQ ID NO:29.

[1042] To determine the percent identity of two amino acid sequences or of two nucleic acid sequences, the sequences are aligned for optimal comparison purposes (e.g., gaps can be introduced in one or both of a first and a second amino acid or nucleic acid sequence for optimal alignment and non-identical sequences can be disregarded for comparison purposes). In a preferred embodiment, the length of a reference sequence aligned for comparison purposes is at least 30%, preferably at least 40%, more preferably at least 50%, even more preferably at least 60%, and even more preferably at least 70%, 80%, or 90% of the length of the reference sequence (e.g., when aligning a second sequence to the TWIK-8 amino acid sequence of SEQ ID NO:29 having 419 amino acid residues, at least 120, preferably at least 160, more preferably at least 201, even more preferably at least 241, and even more preferably at least 281 or more amino acid residues are aligned). The amino acid residues or nucleotides at corresponding amino acid positions or nucleotide positions are then compared. When a position in the first sequence is occupied by the same amino acid residue or nucleotide as the corresponding position in the second sequence, then the molecules are identical at that position (as used herein amino acid or nucleic acid “identity” is equivalent to amino acid or nucleic acid “homology”). The percent identity between the two sequences is a function of the number of identical positions shared by the sequences, taking into account the number of gaps, and the length of each gap, which need to be introduced for optimal alignment of the two sequences.

[1043] The comparison of sequences and determination of percent identity between two sequences can be accomplished using a mathematical algorithm. In a preferred embodiment, the percent identity between two amino acid sequences is determined using the Needleman and Wunsch (J. Mol. Biol. (48):444-453 (1970)) algorithm which has been incorporated into the GAP program in the GCG software package (available at http://www.gcg.com), using either a Blosum 62 matrix or a PAM250 matrix, and a gap weight of 16, 14, 12, 10, 8, 6, or 4 and a length weight of 1, 2, 3, 4, 5, or 6. In yet another preferred embodiment, the percent identity between two nucleotide sequences is determined using the GAP program in the GCG software package (available at http://www.gcg.com), using a NWSgapdna.CMP matrix and a gap weight of 40, 50, 60, 70, or 80 and a length weight of 1, 2, 3, 4, 5, or 6. In another embodiment, the percent identity between two amino acid or nucleotide sequences is determined using the algorithm of E. Meyers and W. Miller (CABIOS, 4:11-17 (1989)) which has been incorporated into the ALIGN program (version 2.0), using a PAM120 weight residue table, a gap length penalty of 12 and a gap penalty of 4.

[1044] The nucleic acid and protein sequences of the present invention can further be used as a “query sequence” to perform a search against public databases to, for example, identify other family members or related sequences. Such searches can be performed using the NBLAST and XBLAST programs (version 2.0) of Altschul, et al. (1990) J. Mol. Biol. 215:403-10. BLAST nucleotide searches can be performed with the NBLAST program, score=100, wordlength=12 to obtain nucleotide sequences homologous to TWIK-8 nucleic acid molecules of the invention. BLAST protein searches can be performed with the XBLAST program, score=100, wordlength=3 to obtain amino acid sequences homologous to TWIK-8 protein molecules of the invention. To obtain gapped alignments for comparison purposes, Gapped BLAST can be utilized as described in Altschul et al., (1997) Nucleic Acids Res. 25(17):3389-3402. When utilizing BLAST and Gapped BLAST programs, the default parameters of the respective programs (e.g., XBLAST and NBLAST) can be used. See http://www.ncbi.nlm.nih.gov.

[1045] The invention also provides TWIK-8 chimeric or fusion proteins. As used herein, a TWIK-8 “chimeric protein” or “fusion protein” comprises a TWIK-8 polypeptide operatively linked to a non-TWIK-8 polypeptide. An “TWIK-8 polypeptide” refers to a polypeptide having an amino acid sequence corresponding to TWIK-8, whereas a “non-TWIK-8 polypeptide” refers to a polypeptide having an amino acid sequence corresponding to a protein which is not substantially homologous to the TWIK-8 protein, e.g., a protein which is different from the TWIK-8 protein and which is derived from the same or a different organism. Within a TWIK-8 fusion protein the TWIK-8 polypeptide can correspond to all or a portion of a TWIK-8 protein. In a preferred embodiment, a TWIK-8 fusion protein comprises at least one biologically active portion of a TWIK-8 protein. In another preferred embodiment, a TWIK-8 fusion protein comprises at least two biologically active portions of a TWIK-8 protein. Within the fusion protein, the term “operatively linked” is intended to indicate that the TWIK-8 polypeptide and the non-TWIK-8 polypeptide are fused in-frame to each other. The non-TWIK-8 polypeptide can be fused to the N-terminus or C-terminus of the TWIK-8 polypeptide.

[1046] For example, in one embodiment, the fusion protein is a GST-TWIK-8 fusion protein in which the TWIK-8 sequences are fused to the C-terminus of the GST sequences. Such fusion proteins can facilitate the purification of recombinant TWIK-8.

[1047] In another embodiment, the fusion protein is a TWIK-8 protein containing a heterologous signal sequence at its N-terminus. In certain host cells (e.g., mammalian host cells), expression and/or secretion of TWIK-8 can be increased through use of a heterologous signal sequence.

[1048] The TWIK-8 fusion proteins of the invention can be incorporated into pharmaceutical compositions and administered to a subject in vivo. The TWIK-8 fusion proteins can be used to affect the bioavailability of a TWIK-8 substrate. Use of TWIK-8 fusion proteins may be useful therapeutically for the treatment of disorders caused by, for example, (i) aberrant modification or mutation of a gene encoding a TWIK-8 protein; (ii) mis-regulation of the TWIK-8 gene; and (iii) aberrant post-translational modification of a TWIK-8 protein.

[1049] Moreover, the TWIK-8-fusion proteins of the invention can be used as immunogens to produce anti-TWIK-8 antibodies in a subject, to purify TWIK-8 ligands and in screening assays to identify molecules which inhibit the interaction of TWIK-8 with a TWIK-8 substrate.

[1050] Preferably, a TWIK-8 chimeric or fusion protein of the invention is produced by standard recombinant DNA techniques. For example, DNA fragments coding for the different polypeptide sequences are ligated together in-frame in accordance with conventional techniques, for example by employing blunt-ended or stagger-ended termini for ligation, restriction enzyme digestion to provide for appropriate termini, filling-in of cohesive ends as appropriate, alkaline phosphatase treatment to avoid undesirable joining, and enzymatic ligation. In another embodiment, the fusion gene can be synthesized by conventional techniques including automated DNA synthesizers. Alternatively, PCR amplification of gene fragments can be carried out using anchor primers which give rise to complementary overhangs between two consecutive gene fragments which can subsequently be annealed and reamplified to generate a chimeric gene sequence (see, for example, Current Protocols in Molecular Biology, eds. Ausubel et al. John Wiley & Sons: 1992). Moreover, many expression vectors are commercially available that already encode a fusion moiety (e.g., a GST polypeptide). A TWIK-8-encoding nucleic acid can be cloned into such an expression vector such that the fusion moiety is linked in-frame to the TWIK-8 protein.

[1051] The present invention also pertains to variants of the TWIK-8 proteins which function as either TWIK-8 agonists (mimetics) or as TWIK-8 antagonists. Variants of the TWIK-8 proteins can be generated by mutagenesis, e.g., discrete point mutation or truncation of a TWIK-8 protein. An agonist of the TWIK-8 proteins can retain substantially the same, or a subset, of the biological activities of the naturally occurring form of a TWIK-8 protein. An antagonist of a TWIK-8 protein can inhibit one or more of the activities of the naturally occurring form of the TWIK-8 protein by, for example, competitively modulating a TWIK-8-mediated activity of a TWIK-8 protein. Thus, specific biological effects can be elicited by treatment with a variant of limited function. In one embodiment, treatment of a subject with a variant having a subset of the biological activities of the naturally occurring form of the protein has fewer side effects in a subject relative to treatment with the naturally occurring form of the TWIK-8 protein.

[1052] In one embodiment, variants of a TWIK-8 protein which function as either TWIK-8 agonists (mimetics) or as TWIK-8 antagonists can be identified by screening combinatorial libraries of mutants, e.g., truncation mutants, of a TWIK-8 protein for TWIK-8 protein agonist or antagonist activity. In one embodiment, a variegated library of TWIK-8 variants is generated by combinatorial mutagenesis at the nucleic acid level and is encoded by a variegated gene library. A variegated library of TWIK-8 variants can be produced by, for example, enzymatically ligating a mixture of synthetic oligonucleotides into gene sequences such that a degenerate set of potential TWIK-8 sequences is expressible as individual polypeptides, or alternatively, as a set of larger fusion proteins (e.g., for phage display) containing the set of TWIK-8 sequences therein. There are a variety of methods which can be used to produce libraries of potential TWIK-8 variants from a degenerate oligonucleotide sequence. Chemical synthesis of a degenerate gene sequence can be performed in an automatic DNA synthesizer, and the synthetic gene then ligated into an appropriate expression vector. Use of a degenerate set of genes allows for the provision, in one mixture, of all of the sequences encoding the desired set of potential TWIK-8 sequences. Methods for synthesizing degenerate oligonucleotides are known in the art (see, e.g., Narang, S. A. (1983) Tetrahedron 39:3; Itakura et al. (1984) Annu. Rev. Biochem. 53:323; Itakura et al. (1984) Science 198:1056; Ike et al. (1983) Nucleic Acid Res. 11:477.

[1053] In addition, libraries of fragments of a TWIK-8 protein coding sequence can be used to generate a variegated population of TWIK-8 fragments for screening and subsequent selection of variants of a TWIK-8 protein. In one embodiment, a library of coding sequence fragments can be generated by treating a double stranded PCR fragment of a TWIK-8 coding sequence with a nuclease under conditions wherein nicking occurs only about once per molecule, denaturing the double stranded DNA, renaturing the DNA to form double stranded DNA which can include sense/antisense pairs from different nicked products, removing single stranded portions from reformed duplexes by treatment with S1 nuclease, and ligating the resulting fragment library into an expression vector. By this method, an expression library can be derived which encodes N-terminal, C-terminal and internal fragments of various sizes of the TWIK-8 protein.

[1054] Several techniques are known in the art for screening gene products of combinatorial libraries made by point mutations or truncation, and for screening cDNA libraries for gene products having a selected property. Such techniques are adaptable for rapid screening of the gene libraries generated by the combinatorial mutagenesis of TWIK-8 proteins. The most widely used techniques, which are amenable to high through-put analysis, for screening large gene libraries typically include cloning the gene library into replicable expression vectors, transforming appropriate cells with the resulting library of vectors, and expressing the combinatorial genes under conditions in which detection of a desired activity facilitates isolation of the vector encoding the gene whose product was detected. Recursive ensemble mutagenesis (REM), a new technique which enhances the frequency of functional mutants in the libraries, can be used in combination with the screening assays to identify TWIK-8 variants (Arkin and Youvan (1992) Proc. Natl. Acad. Sci. USA 89:7811-7815; Delagrave et al. (1993) Protein Engineering 6(3): 327-331).

[1055] In one embodiment, cell based assays can be exploited to analyze a variegated TWIK-8 library. For example, a library of expression vectors can be transfected into a cell line, e.g., a neuronal cell line, which ordinarily responds to a TWIK-8 ligand in a particular TWIK-8 ligand-dependent manner. The transfected cells are then contacted with a TWIK-8 ligand and the effect of expression of the mutant on, e.g., membrane excitability of TWIK-8 can be detected. Plasmid DNA can then be recovered from the cells which score for inhibition, or alternatively, potentiation of signaling by the TWIK-8 ligand, and the individual clones further characterized.

[1056] An isolated TWIK-8 protein, or a portion or fragment thereof, can be used as an immunogen to generate antibodies that bind TWIK-8 using standard techniques for polyclonal and monoclonal antibody preparation. A full-length TWIK-8 protein can be used or, alternatively, the invention provides antigenic peptide fragments of TWIK-8 for use as immunogens. The antigenic peptide of TWIK-8 comprises at least 8 amino acid residues of the amino acid sequence shown in SEQ ID NO:29 and encompasses an epitope of TWIK-8 such that an antibody raised against the peptide forms a specific immune complex with TWIK-8. Preferably, the antigenic peptide comprises at least 10 amino acid residues, more preferably at least 15 amino acid residues, even more preferably at least 20 amino acid residues, and most preferably at least 30 amino acid residues.

[1057] Preferred epitopes encompassed by the antigenic peptide are regions of TWIK-8 that are located on the surface of the protein, e.g., hydrophilic regions, as well as regions with high antigenicity.

[1058] A TWIK-8 immunogen typically is used to prepare antibodies by immunizing a suitable subject, (e.g., rabbit, goat, mouse or other mammal) with the immunogen. An appropriate immunogenic preparation can contain, for example, recombinantly expressed TWIK-8 protein or a chemically synthesized TWIK-8 polypeptide. The preparation can further include an adjuvant, such as Freund's complete or incomplete adjuvant, or similar immunostimulatory agent. Immunization of a suitable subject with an immunogenic TWIK-8 preparation induces a polyclonal anti-TWIK-8 antibody response.

[1059] Accordingly, another aspect of the invention pertains to anti-TWIK-8 antibodies. The term “antibody” as used herein refers to immunoglobulin molecules and immunologically active portions of immunoglobulin molecules, i.e., molecules that contain an antigen binding site which specifically binds (immunoreacts with) an antigen, such as TWIK-8. Examples of immunologically active portions of immunoglobulin molecules include F(ab) and F(ab′)₂ fragments which can be generated by treating the antibody with an enzyme such as pepsin. The invention provides polyclonal and monoclonal antibodies that bind TWIK-8. The term “monoclonal antibody” or “monoclonal antibody composition”, as used herein, refers to a population of antibody molecules that contain only one species of an antigen binding site capable of immunoreacting with a particular epitope of TWIK-8. A monoclonal antibody composition thus typically displays a single binding affinity for a particular TWIK-8 protein with which it immunoreacts.

[1060] Polyclonal anti-TWIK-8 antibodies can be prepared as described above by immunizing a suitable subject with a TWIK-8 immunogen. The anti-TWIK-8 antibody titer in the immunized subject can be monitored over time by standard techniques, such as with an enzyme linked immunosorbent assay (ELISA) using immobilized TWIK-8. If desired, the antibody molecules directed against TWIK-8 can be isolated from the mammal (e.g., from the blood) and further purified by well known techniques, such as protein A chromatography to obtain the IgG fraction. At an appropriate time after immunization, e.g., when the anti-TWIK-8 antibody titers are highest, antibody-producing cells can be obtained from the subject and used to prepare monoclonal antibodies by standard techniques, such as the hybridoma technique originally described by Kohler and Milstein (1975) Nature 256:495-497) (see also, Brown et al. (1981) J. Immunol. 127:539-46; Brown et al. (1980) J. Biol. Chem. 255:4980-83; Yeh et al. (1976) Proc. Natl. Acad. Sci. USA 76:2927-31; and Yeh et al. (1982) Int. J. Cancer 29:269-75), the more recent human B cell hybridoma technique (Kozbor et al. (1983) Immunol Today 4:72), the EBV-hybridoma technique (Cole et al. (1985), Monoclonal Antibodies and Cancer Therapy, Alan R. Liss, Inc., pp. 77-96) or trioma techniques. The technology for producing monoclonal antibody hybridomas is well known (see generally R. H. Kenneth, in Monoclonal Antibodies: A New Dimension In Biological Analyses, Plenum Publishing Corp., New York, N.Y. (1980); E. A. Lerner (1981) Yale J. Biol. Med., 54:387-402; M. L. Gefter et al. (1977) Somatic Cell Genet. 3:231-36). Briefly, an immortal cell line (typically a myeloma) is fused to lymphocytes (typically splenocytes) from a mammal immunized with a TWIK-8 immunogen as described above, and the culture supernatants of the resulting hybridoma cells are screened to identify a hybridoma producing a monoclonal antibody that binds TWIK-8.

[1061] Any of the many well known protocols used for fusing lymphocytes and immortalized cell lines can be applied for the purpose of generating an anti-TWIK-8 monoclonal antibody (see, e.g., G. Galfre et al. (1977) Nature 266:55052; Gefter et al. Somatic Cell Genet., cited supra; Lerner, Yale J. Biol. Med., cited supra; Kenneth, Monoclonal Antibodies, cited supra). Moreover, the ordinarily skilled worker will appreciate that there are many variations of such methods which also would be useful. Typically, the immortal cell line (e.g., a myeloma cell line) is derived from the same mammalian species as the lymphocytes. For example, murine hybridomas can be made by fusing lymphocytes from a mouse immunized with an immunogenic preparation of the present invention with an immortalized mouse cell line. Preferred immortal cell lines are mouse myeloma cell lines that are sensitive to culture medium containing hypoxanthine, aminopterin and thymidine (“HAT medium”). Any of a number of myeloma cell lines can be used as a fusion partner according to standard techniques, e.g., the P3-NS1/1-Ag4-1, P3-x63-Ag8.653 or Sp2/O-Ag14 myeloma lines. These myeloma lines are available from ATCC. Typically, HAT-sensitive mouse myeloma cells are fused to mouse splenocytes using polyethylene glycol (“PEG”). Hybridoma cells resulting from the fusion are then selected using HAT medium, which kills unfused and unproductively fused myeloma cells (unfused splenocytes die after several days because they are not transformed). Hybridoma cells producing a monoclonal antibody of the invention are detected by screening the hybridoma culture supernatants for antibodies that bind TWIK-8, e.g., using a standard ELISA assay.

[1062] Alternative to preparing monoclonal antibody-secreting hybridomas, a monoclonal anti-TWIK-8 antibody can be identified and isolated by screening a recombinant combinatorial immunoglobulin library (e.g., an antibody phage display library) with TWIK-8 to thereby isolate immunoglobulin library members that bind TWIK-8. Kits for generating and screening phage display libraries are commercially available (e.g., the Pharmacia Recombinant Phage Antibody System, Catalog No. 27-9400-01; and the Stratagene SurfZAP™ Phage Display Kit, Catalog No. 240612). Additionally, examples of methods and reagents particularly amenable for use in generating and screening antibody display library can be found in, for example, Ladner et al. U.S. Pat. No. 5,223,409; Kang et al. PCT International Publication No. WO 92/18619; Dower et al. PCT International Publication No. WO 91/17271; Winter et al. PCT International Publication WO 92/20791; Markland et al. PCT International Publication No. WO 92/15679; Breitling et al. PCT International Publication WO 93/01288; McCafferty et al. PCT International Publication No. WO 92/01047; Garrard et al. PCT International Publication No. WO 92/09690; Ladner et al. PCT International Publication No. WO 90/02809; Fuchs et al. (1991) Bio/Technology 9:1370-1372; Hay et al. (1992) Hum. Antibod. Hybridomas 3:81-85; Huse et al. (1989) Science 246:1275-1281; Griffiths et al. (1993) EMBO J 12:725-734; Hawkins et al. (1992) J. Mol. Biol. 226:889-896; Clackson et al. (1991) Nature 352:624-628; Gram et al. (1992) Proc. Natl. Acad. Sci. USA 89:3576-3580; Garrard et al. (1991) Bio/Technology 9:1373-1377; Hoogenboom et al. (1991) Nuc. Acid Res. 19:4133-4137; Barbas et al. (1991) Proc. Natl. Acad. Sci. USA 88:7978-7982; and McCafferty et al. Nature (1990) 348:552-554.

[1063] Additionally, recombinant anti-TWIK-8 antibodies, such as chimeric and humanized monoclonal antibodies, comprising both human and non-human portions, which can be made using standard recombinant DNA techniques, are within the scope of the invention. Such chimeric and humanized monoclonal antibodies can be produced by recombinant DNA techniques known in the art, for example using methods described in Robinson et al. International Application No. PCT/US86/02269; Akira, et al. European Patent Application 184,187; Taniguchi, M., European Patent Application 171,496; Morrison et al. European Patent Application 173,494; Neuberger et al. PCT International Publication No. WO 86/01533; Cabilly et al. U.S. Pat. No. 4,816,567; Cabilly et al. European Patent Application 125,023; Better et al. (1988) Science 240:1041-1043; Liu et al. (1987) Proc. Natl. Acad. Sci. USA 84:3439-3443; Liu et al. (1987) J. Immunol. 139:3521-3526; Sun et al. (1987) Proc. Natl. Acad. Sci. USA 84:214-218; Nishimura et al. (1987) Canc. Res. 47:999-1005; Wood et al. (1985) Nature 314:446-449; and Shaw et al. (1988) J. Natl. Cancer Inst. 80:1553-1559); Morrison, S. L. (1985) Science 229:1202-1207; Oi et al. (1986) BioTechniques 4:214; Winter U.S. Pat. No. 5,225,539; Jones et al. (1986) Nature 321:552-525; Verhoeyen et al. (1988) Science 239:1534; and Beidler et al. (1988) J. Immunol. 141:4053-4060.

[1064] An anti-TWIK-8 antibody (e.g., monoclonal antibody) can be used to isolate TWIK-8 by standard techniques, such as affinity chromatography or immunoprecipitation. An anti-TWIK-8 antibody can facilitate the purification of natural TWIK-8 from cells and of recombinantly produced TWIK-8 expressed in host cells. Moreover, an anti-TWIK-8 antibody can be used to detect TWIK-8 protein (e.g., in a cellular lysate or cell supernatant) in order to evaluate the abundance and pattern of expression of the TWIK-8 protein. Anti-TWIK-8 antibodies can be used diagnostically to monitor protein levels in tissue as part of a clinical testing procedure, e.g., to, for example, determine the efficacy of a given treatment regimen. Detection can be facilitated by coupling (i.e., physically linking) the antibody to a detectable substance. Examples of detectable substances include various enzymes, prosthetic groups, fluorescent materials, luminescent materials, bioluminescent materials, and radioactive materials. Examples of suitable enzymes include horseradish peroxidase, alkaline phosphatase, β-galactosidase, or acetylcholinesterase; examples of suitable prosthetic group complexes include streptavidin/biotin and avidin/biotin; examples of suitable fluorescent materials include umbelliferone, fluorescein, fluorescein isothiocyanate, rhodamine, dichlorotriazinylamine fluorescein, dansyl chloride or phycoerythrin; an example of a luminescent material includes luminol; examples of bioluminescent materials include luciferase, luciferin, and aequorin, and examples of suitable radioactive material include ¹²⁵I, ¹³¹I, ³⁵S or ³H.

[1065] III. Recombinant Expression Vectors and Host Cells

[1066] Another aspect of the invention pertains to vectors, preferably expression vectors, containing a nucleic acid encoding a TWIK-8 protein (or a portion thereof). As used herein, the term “vector” refers to a nucleic acid molecule capable of transporting another nucleic acid to which it has been linked. One type of vector is a “plasmid”, which refers to a circular double stranded DNA loop into which additional DNA segments can be ligated. Another type of vector is a viral vector, wherein additional DNA segments can be ligated into the viral genome. Certain vectors are capable of autonomous replication in a host cell into which they are introduced (e.g., bacterial vectors having a bacterial origin of replication and episomal mammalian vectors). Other vectors (e.g., non-episomal mammalian vectors) are integrated into the genome of a host cell upon introduction into the host cell, and thereby are replicated along with the host genome. Moreover, certain vectors are capable of directing the expression of genes to which they are operatively linked. Such vectors are referred to herein as “expression vectors”. In general, expression vectors of utility in recombinant DNA techniques are often in the form of plasmids. In the present specification, “plasmid” and “vector” can be used interchangeably as the plasmid is the most commonly used form of vector. However, the invention is intended to include such other forms of expression vectors, such as viral vectors (e.g., replication defective retroviruses, adenoviruses and adeno-associated viruses), which serve equivalent functions.

[1067] The recombinant expression vectors of the invention comprise a nucleic acid of the invention in a form suitable for expression of the nucleic acid in a host cell, which means that the recombinant expression vectors include one or more regulatory sequences, selected on the basis of the host cells to be used for expression, which is operatively linked to the nucleic acid sequence to be expressed. Within a recombinant expression vector, “operably linked” is intended to mean that the nucleotide sequence of interest is linked to the regulatory sequence(s) in a manner which allows for expression of the nucleotide sequence (e.g., in an in vitro transcription/translation system or in a host cell when the vector is introduced into the host cell). The term “regulatory sequence” is intended to include promoters, enhancers and other expression control elements (e.g., polyadenylation signals). Such regulatory sequences are described, for example, in Goeddel; Gene Expression Technology: Methods in Enzymology 185, Academic Press, San Diego, Calif. (1990). Regulatory sequences include those which direct constitutive expression of a nucleotide sequence in many types of host cells and those which direct expression of the nucleotide sequence only in certain host cells (e.g., tissue-specific regulatory sequences). It will be appreciated by those skilled in the art that the design of the expression vector can depend on such factors as the choice of the host cell to be transformed, the level of expression of protein desired, and the like. The expression vectors of the invention can be introduced into host cells to thereby produce proteins or peptides, including fusion proteins or peptides, encoded by nucleic acids as described herein (e.g., TWIK-8 proteins, mutant forms of TWIK-8 proteins, fusion proteins, and the like).

[1068] The recombinant expression vectors of the invention can be designed for expression of TWIK-8 proteins in prokaryotic or eukaryotic cells. For example, TWIK-8 proteins can be expressed in bacterial cells such as E. coli, insect cells (using baculovirus expression vectors) yeast cells or mammalian cells. Suitable host cells are discussed further in Goeddel, Gene Expression Technology: Methods in Enzymology 185, Academic Press, San Diego, Calif. (1990). Alternatively, the recombinant expression vector can be transcribed and translated in vitro, for example using T7 promoter regulatory sequences and T7 polymerase.

[1069] Expression of proteins in prokaryotes is most often carried out in E. coli with vectors containing constitutive or inducible promoters directing the expression of either fusion or non-fusion proteins. Fusion vectors add a number of amino acids to a protein encoded therein, usually to the amino terminus of the recombinant protein. Such fusion vectors typically serve three purposes: 1) to increase expression of recombinant protein; 2) to increase the solubility of the recombinant protein; and 3) to aid in the purification of the recombinant protein by acting as a ligand in affinity purification. Often, in fusion expression vectors, a proteolytic cleavage site is introduced at the junction of the fusion moiety and the recombinant protein to enable separation of the recombinant protein from the fusion moiety subsequent to purification of the fusion protein. Such enzymes, and their cognate recognition sequences, include Factor Xa, thrombin and enterokinase. Typical fusion expression vectors include pGEX (Pharmacia Biotech Inc; Smith, D. B. and Johnson, K. S. (1988) Gene 67:31-40), pMAL (New England Biolabs, Beverly, Mass.) and pRIT5 (Pharmacia, Piscataway, N.J.) which fuse glutathione S-transferase (GST), maltose E binding protein, or protein A, respectively, to the target recombinant protein.

[1070] Purified fusion proteins can be utilized in TWIK-8 activity assays, (e.g., direct assays or competitive assays described in detail below), or to generate antibodies specific for TWIK-8 proteins, for example. In a preferred embodiment, a TWIK-8 fusion protein expressed in a retroviral expression vector of the present invention can be utilized to infect bone marrow cells which are subsequently transplanted into irradiated recipients. The pathology of the subject recipient is then examined after sufficient time has passed (e.g., six (6) weeks).

[1071] Examples of suitable inducible non-fusion E. coli expression vectors include pTrc (Amann et al., (1988) Gene 69:301-315) and pET 11d (Studier et al., Gene Expression Technology: Methods in Enzymology 185, Academic Press, San Diego, Calif. (1990) 60-89). Target gene expression from the pTrc vector relies on host RNA polymerase transcription from a hybrid trp-lac fusion promoter. Target gene expression from the pET 11d vector relies on transcription from a T7 gn10-lac fusion promoter mediated by a coexpressed viral RNA polymerase (T7 gn1). This viral polymerase is supplied by host strains BL21(DE3) or HMS174(DE3) from a resident prophage harboring a T7 gn1gene under the transcriptional control of the lacUV 5 promoter.

[1072] One strategy to maximize recombinant protein expression in E. coli is to express the protein in a host bacteria with an impaired capacity to proteolytically cleave the recombinant protein (Gottesman, S., Gene Expression Technology: Methods in Enzymology 185, Academic Press, San Diego, Calif. (1990) 119-128). Another strategy is to alter the nucleic acid sequence of the nucleic acid to be inserted into an expression vector so that the individual codons for each amino acid are those preferentially utilized in E. coli (Wada et al., (1992) Nucleic Acids Res. 20:2111-2118). Such alteration of nucleic acid sequences of the invention can be carried out by standard DNA synthesis techniques.

[1073] In another embodiment, the TWIK-8 expression vector is a yeast expression vector. Examples of vectors for expression in yeast S. cerevisiae include pYepSec1 (Baldari, et al., (1987) EMBO J. 6:229-234), pMFa (Kurjan and Herskowitz, (1982) Cell 30:933-943), pJRY88 (Schultz et al., (1987) Gene 54:113-123), pYES2 (Invitrogen Corporation, San Diego, Calif.), and picZ (Invitrogen Corporation, San Diego, Calif.).

[1074] Alternatively, TWIK-8 proteins can be expressed in insect cells using baculovirus expression vectors. Baculovirus vectors available for expression of proteins in cultured insect cells (e.g., Sf 9 cells) include the pAc series (Smith et al. (1983) Mol. Cell Biol. 3:2156-2165) and the pVL series (Lucklow and Summers (1989) Virology 170:31-39).

[1075] In yet another embodiment, a nucleic acid of the invention is expressed in mammalian cells using a mammalian expression vector. Examples of mammalian expression vectors include pCDM8 (Seed, B. (1987) Nature 329:840) and pMT2PC (Kaufman et al. (1987) EMBO J. 6:187-195). When used in mammalian cells, the expression vector's control functions are often provided by viral regulatory elements. For example, commonly used promoters are derived from polyoma, Adenovirus 2, cytomegalovirus and Simian Virus 40. For other suitable expression systems for both prokaryotic and eukaryotic cells see chapters 16 and 17 of Sambrook, J., Fritsh, E. F., and Maniatis, T. Molecular Cloning: A Laboratory Manual. 2nd, ed., Cold Spring Harbor Laboratory, Cold Spring Harbor Laboratory Press, Cold Spring Harbor, N.Y., 1989.

[1076] In another embodiment, the recombinant mammalian expression vector is capable of directing expression of the nucleic acid preferentially in a particular cell type (e.g., tissue-specific regulatory elements are used to express the nucleic acid). Tissue-specific regulatory elements are known in the art. Non-limiting examples of suitable tissue-specific promoters include the albumin promoter (liver-specific; Pinkert et al. (1987) Genes Dev. 1:268-277), lymphoid-specific promoters (Calame and Eaton (1988) Adv. Immunol. 43:235-275), in particular promoters of T cell receptors (Winoto and Baltimore (1989) EMBO J. 8:729-733) and immunoglobulins (Banerji et al. (1983) Cell 33:729-740; Queen and Baltimore (1983) Cell 33:741-748), neuron-specific promoters (e.g., the neurofilament promoter; Byrne and Ruddle (1989) Proc. Natl. Acad. Sci. USA 86:5473-5477), pancreas-specific promoters (Edlund et al. (1985) Science 230:912-916), and mammary gland-specific promoters (e.g., milk whey promoter; U.S. Pat. No. 4,873,316 and European Application Publication No. 264,166). Developmentally-regulated promoters are also encompassed, for example the murine hox promoters (Kessel and Gruss (1990) Science 249:374-379) and the α-fetoprotein promoter (Campes and Tilghman (1989) Genes Dev. 3:537-546).

[1077] The invention further provides a recombinant expression vector comprising a DNA molecule of the invention cloned into the expression vector in an antisense orientation. That is, the DNA molecule is operatively linked to a regulatory sequence in a manner which allows for expression (by transcription of the DNA molecule) of an RNA molecule which is antisense to TWIK-8 mRNA. Regulatory sequences operatively linked to a nucleic acid cloned in the antisense orientation can be chosen which direct the continuous expression of the antisense RNA molecule in a variety of cell types, for instance viral promoters and/or enhancers, or regulatory sequences can be chosen which direct constitutive, tissue specific or cell type specific expression of antisense RNA. The antisense expression vector can be in the form of a recombinant plasmid, phagemid or attenuated virus in which antisense nucleic acids are produced under the control of a high efficiency regulatory region, the activity of which can be determined by the cell type into which the vector is introduced. For a discussion of the regulation of gene expression using antisense genes see Weintraub, H. et al., Antisense RNA as a molecular tool for genetic analysis, Reviews—Trends in Genetics, Vol. 1(1) 1986.

[1078] Another aspect of the invention pertains to host cells into which a TWIK-8 nucleic acid molecule of the invention is introduced, e.g, a TWIK-8 nucleic acid molecule within a recombinant expression vector or a TWIK-8 nucleic acid molecule containing sequences which allow it to homologously recombine into a specific site of the host cell's genome. The terms “host cell” and “recombinant host cell” are used interchangeably herein. It is understood that such terms refer not only to the particular subject cell but to the progeny or potential progeny of such a cell. Because certain modifications may occur in succeeding generations due to either mutation or environmental influences, such progeny may not, in fact, be identical to the parent cell, but are still included within the scope of the term as used herein.

[1079] A host cell can be any prokaryotic or eukaryotic cell. For example, a TWIK-8 protein can be expressed in bacterial cells such as E. coli, insect cells, yeast or mammalian cells (such as Chinese hamster ovary cells (CHO) or COS cells). Other suitable host cells are known to those skilled in the art.

[1080] Vector DNA can be introduced into prokaryotic or eukaryotic cells via conventional transformation or transfection techniques. As used herein, the terms “transformation” and “transfection” are intended to refer to a variety of art-recognized techniques for introducing foreign nucleic acid (e.g., DNA) into a host cell, including calcium phosphate or calcium chloride co-precipitation, DEAE-dextran-mediated transfection, lipofection, or electroporation. Suitable methods for transforming or transfecting host cells can be found in Sambrook, et al. (Molecular Cloning: A Laboratory Manual. 2nd, ed., Cold Spring Harbor Laboratory, Cold Spring Harbor Laboratory Press, Cold Spring Harbor, N.Y., 1989), and other laboratory manuals.

[1081] For stable transfection of mammalian cells, it is known that, depending upon the expression vector and transfection technique used, only a small fraction of cells may integrate the foreign DNA into their genome. In order to identify and select these integrants, a gene that encodes a selectable marker (e.g., resistance to antibiotics) is generally introduced into the host cells along with the gene of interest. Preferred selectable markers include those which confer resistance to drugs, such as G418, hygromycin and methotrexate. Nucleic acid encoding a selectable marker can be introduced into a host cell on the same vector as that encoding a TWIK-8 protein or can be introduced on a separate vector. Cells stably transfected with the introduced nucleic acid can be identified by drug selection (e.g., cells that have incorporated the selectable marker gene will survive, while the other cells die).

[1082] A host cell of the invention, such as a prokaryotic or eukaryotic host cell in culture, can be used to produce (i.e., express) a TWIK-8 protein. Accordingly, the invention further provides methods for producing a TWIK-8 protein using the host cells of the invention. In one embodiment, the method comprises culturing the host cell of the invention (into which a recombinant expression vector encoding a TWIK-8 protein has been introduced) in a suitable medium such that a TWIK-8 protein is produced. In another embodiment, the method further comprises isolating a TWIK-8 protein from the medium or the host cell.

[1083] The host cells of the invention can also be used to produce non-human transgenic animals. For example, in one embodiment, a host cell of the invention is a fertilized oocyte or an embryonic stem cell into which TWIK-8-coding sequences have been introduced. Such host cells can then be used to create non-human transgenic animals in which exogenous TWIK-8 sequences have been introduced into their genome or homologous recombinant animals in which endogenous TWIK-8 sequences have been altered. Such animals are useful for studying the function and/or activity of a TWIK-8 and for identifying and/or evaluating modulators of TWIK-8 activity. As used herein, a “transgenic animal” is a non-human animal, preferably a mammal, more preferably a rodent such as a rat or mouse, in which one or more of the cells of the animal includes a transgene. Other examples of transgenic animals include non-human primates, sheep, dogs, cows, goats, chickens, amphibians, and the like. A transgene is exogenous DNA which is integrated into the genome of a cell from which a transgenic animal develops and which remains in the genome of the mature animal, thereby directing the expression of an encoded gene product in one or more cell types or tissues of the transgenic animal. As used herein, a “homologous recombinant animal” is a non-human animal, preferably a mammal, more preferably a mouse, in which an endogenous TWIK-8 gene has been altered by homologous recombination between the endogenous gene and an exogenous DNA molecule introduced into a cell of the animal, e.g., an embryonic cell of the animal, prior to development of the animal.

[1084] A transgenic animal of the invention can be created by introducing a TWIK-8-encoding nucleic acid into the male pronuclei of a fertilized oocyte, e.g., by microinjection, retroviral infection, and allowing the oocyte to develop in a pseudopregnant female foster animal. The TWIK-8 cDNA sequence of SEQ ID NO:28 can be introduced as a transgene into the genome of a non-human animal. Alternatively, a nonhuman homologue of a human TWIK-8 gene, such as a mouse or rat TWIK-8 gene, can be used as a transgene. Alternatively, a TWIK-8 gene homologue, such as another TWIK-8 family member, can be isolated based on hybridization to the TWIK-8 cDNA sequences of SEQ ID NO:28 or 30, or the DNA insert of the plasmid deposited with ATCC as Accession Number ______ (described further in subsection I above) and used as a transgene. Intronic sequences and polyadenylation signals can also be included in the transgene to increase the efficiency of expression of the transgene. A tissue-specific regulatory sequence(s) can be operably linked to a TWIK-8 transgene to direct expression of a TWIK-8 protein to particular cells. Methods for generating transgenic animals via embryo manipulation and microinjection, particularly animals such as mice, have become conventional in the art and are described, for example, in U.S. Pat. Nos. 4,736,866 and 4,870,009, both by Leder et al., U.S. Pat. No. 4,873,191 by Wagneret al. and in Hogan, B., Manipulating the Mouse Embryo, (Cold Spring Harbor Laboratory Press, Cold Spring Harbor, N.Y., 1986). Similar methods are used for production of other transgenic animals. A transgenic founder animal can be identified based upon the presence of a TWIK-8 transgene in its genome and/or expression of TWIK-8 mRNA in tissues or cells of the animals. A transgenic founder animal can then be used to breed additional animals carrying the transgene. Moreover, transgenic animals carrying a transgene encoding a TWIK-8 protein can further be bred to other transgenic animals carrying other transgenes.

[1085] To create a homologous recombinant animal, a vector is prepared which contains at least a portion of a TWIK-8 gene into which a deletion, addition or substitution has been introduced to thereby alter, e.g., functionally disrupt, the TWIK-8 gene. The TWIK-8 gene can be a human gene (e.g., the cDNA of SEQ ID NO:30), but more preferably, is a non-human homologue of a human TWIK-8 gene (e.g., a cDNA isolated by stringent hybridization with the nucleotide sequence of SEQ ID NO:28). For example, a mouse TWIK-8 gene can be used to construct a homologous recombination nucleic acid molecule, e.g., a vector, suitable for altering an endogenous TWIK-8 gene in the mouse genome. In a preferred embodiment, the homologous recombination nucleic acid molecule is designed such that, upon homologous recombination, the endogenous TWIK-8 gene is functionally disrupted (i.e., no longer encodes a functional protein; also referred to as a “knock out” vector). Alternatively, the homologous recombination nucleic acid molecule can be designed such that, upon homologous recombination, the endogenous TWIK-8 gene is mutated or otherwise altered but still encodes functional protein (e.g., the upstream regulatory region can be altered to thereby alter the expression of the endogenous TWIK-8 protein). In the homologous recombination nucleic acid molecule, the altered portion of the TWIK-8 gene is flanked at its 5′ and 3′ ends by additional nucleic acid sequence of the TWIK-8 gene to allow for homologous recombination to occur between the exogenous TWIK-8 gene carried by the homologous recombination nucleic acid molecule and an endogenous TWIK-8 gene in a cell, e.g., an embryonic stem cell. The additional flanking TWIK-8 nucleic acid sequence is of sufficient length for successful homologous recombination with the endogenous gene. Typically, several kilobases of flanking DNA (both at the 5′ and 3′ ends) are included in the homologous recombination nucleic acid molecule (see, e.g., Thomas, K. R. and Capecchi, M. R. (1987) Cell 51:503 for a description of homologous recombination vectors). The homologous recombination nucleic acid molecule is introduced into a cell, e.g., an embryonic stem cell line (e.g., by electroporation) and cells in which the introduced TWIK-8 gene has homologously recombined with the endogenous TWIK-8 gene are selected (see e.g., Li, E. et al. (1992) Cell 69:915). The selected cells can then injected into a blastocyst of an animal (e.g., a mouse) to form aggregation chimeras (see e.g., Bradley, A. in Teratocarcinomas and Embryonic Stem Cells. A Practical Approach, E. J. Robertson, ed. (IRL, Oxford, 1987) pp. 113-152). A chimeric embryo can then be implanted into a suitable pseudopregnant female foster animal and the embryo brought to term. Progeny harboring the homologously recombined DNA in their germ cells can be used to breed animals in which all cells of the animal contain the homologously recombined DNA by germline transmission of the transgene. Methods for constructing homologous recombination nucleic acid molecules, e.g., vectors, or homologous recombinant animals are described further in Bradley, A. (1991) Current Opinion in Biotechnology 2:823-829 and in PCT International Publication Nos.: WO 90/11354 by Le Mouellec et al.; WO 91/01140 by Smithies et al.; WO 92/0968 by Zijlstra et al.; and WO 93/04169 by Berns et al.

[1086] In another embodiment, transgenic non-human animals can be produced which contain selected systems which allow for regulated expression of the transgene. One example of such a system is the cre/loxP recombinase system of bacteriophage P1. For a description of the cre/loxP recombinase system, see, e.g., Lakso et al. (1992) Proc. Natl. Acad. Sci. USA 89:6232-6236. Another example of a recombinase system is the FLP recombinase system of Saccharomyces cerevisiae (O'Gorman et al. (1991) Science 251:1351-1355. If a cre/loxP recombinase system is used to regulate expression of the transgene, animals containing transgenes encoding both the Cre recombinase and a selected protein are required. Such animals can be provided through the construction of “double” transgenic animals, e.g., by mating two transgenic animals, one containing a transgene encoding a selected protein and the other containing a transgene encoding a recombinase.

[1087] Clones of the non-human transgenic animals described herein can also be produced according to the methods described in Wilmut, I. et al. (1997) Nature 385:810-813 and PCT International Publication Nos. WO 97/07668 and WO 97/07669. In brief, a cell, e.g., a somatic cell, from the transgenic animal can be isolated and induced to exit the growth cycle and enter G_{O} phase. The quiescent cell can then be fused, e.g., through the use of electrical pulses, to an enucleated oocyte from an animal of the same species from which the quiescent cell is isolated. The reconstructed oocyte is then cultured such that it develops to morula or blastocyte and then transferred to pseudopregnant female foster animal. The offspring borne of this female foster animal will be a clone of the animal from which the cell, e.g., the somatic cell, is isolated.

[1088] IV. Pharmaceutical Compositions

[1089] The TWIK-8 nucleic acid molecules, fragments of TWIK-8 proteins, and anti-TWIK-8 antibodies (also referred to herein as “active compounds”) of the invention can be incorporated into pharmaceutical compositions suitable for administration. Such compositions typically comprise the nucleic acid molecule, protein, or antibody and a pharmaceutically acceptable carrier. As used herein the language “pharmaceutically acceptable carrier” is intended to include any and all solvents, dispersion media, coatings, antibacterial and antifungal agents, isotonic and absorption delaying agents, and the like, compatible with pharmaceutical administration. The use of such media and agents for pharmaceutically active substances is well known in the art. Except insofar as any conventional media or agent is incompatible with the active compound, use thereof in the compositions is contemplated. Supplementary active compounds can also be incorporated into the compositions.

[1090] A pharmaceutical composition of the invention is formulated to be compatible with its intended route of administration. Examples of routes of administration include parenteral, e.g., intravenous, intradermal, subcutaneous, oral (e.g., inhalation), transdermal (topical), transmucosal, and rectal administration. Solutions or suspensions used for parenteral, intradermal, or subcutaneous application can include the following components: a sterile diluent such as water for injection, saline solution, fixed oils, polyethylene glycols, glycerine, propylene glycol or other synthetic solvents; antibacterial agents such as benzyl alcohol or methyl parabens; antioxidants such as ascorbic acid or sodium bisulfite; chelating agents such as ethylenediaminetetraacetic acid; buffers such as acetates, citrates or phosphates and agents for the adjustment of tonicity such as sodium chloride or dextrose. pH can be adjusted with acids or bases, such as hydrochloric acid or sodium hydroxide. The parenteral preparation can be enclosed in ampoules, disposable syringes or multiple dose vials made of glass or plastic.

[1091] Pharmaceutical compositions suitable for injectable use include sterile aqueous solutions (where water soluble) or dispersions and sterile powders for the extemporaneous preparation of sterile injectable solutions or dispersion. For intravenous administration, suitable carriers include physiological saline, bacteriostatic water, Cremophor EL™ (BASF, Parsippany, N.J.) or phosphate buffered saline (PBS). In all cases, the composition must be sterile and should be fluid to the extent that easy syringeability exists. It must be stable under the conditions of manufacture and storage and must be preserved against the contaminating action of microorganisms such as bacteria and fungi. The carrier can be a solvent or dispersion medium containing, for example, water, ethanol, polyol (for example, glycerol, propylene glycol, and liquid polyetheylene glycol, and the like), and suitable mixtures thereof. The proper fluidity can be maintained, for example, by the use of a coating such as lecithin, by the maintenance of the required particle size in the case of dispersion and by the use of surfactants. Prevention of the action of microorganisms can be achieved by various antibacterial and antifungal agents, for example, parabens, chlorobutanol, phenol, ascorbic acid, thimerosal, and the like. In many cases, it will be preferable to include isotonic agents, for example, sugars, polyalcohols such as manitol, sorbitol, sodium chloride in the composition. Prolonged absorption of the injectable compositions can be brought about by including in the composition an agent which delays absorption, for example, aluminum monostearate and gelatin.

[1092] Sterile injectable solutions can be prepared by incorporating the active compound (e.g., a fragment of a TWIK-8 protein or an anti-TWIK-8 antibody) in the required amount in an appropriate solvent with one or a combination of ingredients enumerated above, as required, followed by filtered sterilization. Generally, dispersions are prepared by incorporating the active compound into a sterile vehicle which contains a basic dispersion medium and the required other ingredients from those enumerated above. In the case of sterile powders for the preparation of sterile injectable solutions, the preferred methods of preparation are vacuum drying and freeze-drying which yields a powder of the active ingredient plus any additional desired ingredient from a previously sterile-filtered solution thereof.

[1093] Oral compositions generally include an inert diluent or an edible carrier. They can be enclosed in gelatin capsules or compressed into tablets. For the purpose of oral therapeutic administration, the active compound can be incorporated with excipients and used in the form of tablets, troches, or capsules. Oral compositions can also be prepared using a fluid carrier for use as a mouthwash, wherein the compound in the fluid carrier is applied orally and swished and expectorated or swallowed. Pharmaceutically compatible binding agents, and/or adjuvant materials can be included as part of the composition. The tablets, pills, capsules, troches and the like can contain any of the following ingredients, or compounds of a similar nature: a binder such as microcrystalline cellulose, gum tragacanth or gelatin; an excipient such as starch or lactose, a disintegrating agent such as alginic acid, Primogel, or corn starch; a lubricant such as magnesium stearate or Sterotes; a glidant such as colloidal silicon dioxide; a sweetening agent such as sucrose or saccharin; or a flavoring agent such as peppermint, methyl salicylate, or orange flavoring.

[1094] For administration by inhalation, the compounds are delivered in the form of an aerosol spray from pressured container or dispenser which contains a suitable propellant, e.g., a gas such as carbon dioxide, or a nebulizer.

[1095] Systemic administration can also be by transmucosal or transdermal means. For transmucosal or transdermal administration, penetrants appropriate to the barrier to be permeated are used in the formulation. Such penetrants are generally known in the art, and include, for example, for transmucosal administration, detergents, bile salts, and fusidic acid derivatives. Transmucosal administration can be accomplished through the use of nasal sprays or suppositories. For transdermal administration, the active compounds are formulated into ointments, salves, gels, or creams as generally known in the art.

[1096] The compounds can also be prepared in the form of suppositories (e.g., with conventional suppository bases such as cocoa butter and other glycerides) or retention enemas for rectal delivery.

[1097] In one embodiment, the active compounds are prepared with carriers that will protect the compound against rapid elimination from the body, such as a controlled release formulation, including implants and microencapsulated delivery systems. Biodegradable, biocompatible polymers can be used, such as ethylene vinyl acetate, polyanhydrides, polyglycolic acid, collagen, polyorthoesters, and polylactic acid. Methods for preparation of such formulations will be apparent to those skilled in the art. The materials can also be obtained commercially from Alza Corporation and Nova Pharmaceuticals, Inc. Liposomal suspensions (including liposomes targeted to infected cells with monoclonal antibodies to viral antigens) can also be used as pharmaceutically acceptable carriers. These can be prepared according to methods known to those skilled in the art, for example, as described in U.S. Pat. No. 4,522,811.

[1098] It is especially advantageous to formulate oral or parenteral compositions in dosage unit form for ease of administration and uniformity of dosage. Dosage unit form as used herein refers to physically discrete units suited as unitary dosages for the subject to be treated; each unit containing a predetermined quantity of active compound calculated to produce the desired therapeutic effect in association with the required pharmaceutical carrier. The specification for the dosage unit forms of the invention are dictated by and directly dependent on the unique characteristics of the active compound and the particular therapeutic effect to be achieved, and the limitations inherent in the art of compounding such an active compound for the treatment of individuals.

[1099] Toxicity and therapeutic efficacy of such compounds can be determined by standard pharmaceutical procedures in cell cultures or experimental animals, e.g., for determining the LD50 (the dose lethal to 50% of the population) and the ED50 (the dose therapeutically effective in 50% of the population). The dose ratio between toxic and therapeutic effects is the therapeutic index and it can be expressed as the ratio LD50/ED50. Compounds which exhibit large therapeutic indices are preferred. While compounds that exhibit toxic side effects may be used, care should be taken to design a delivery system that targets such compounds to the site of affected tissue in order to minimize potential damage to uninfected cells and, thereby, reduce side effects.

[1100] The data obtained from the cell culture assays and animal studies can be used in formulating a range of dosage for use in humans. The dosage of such compounds lies preferably within a range of circulating concentrations that include the ED50 with little or no toxicity. The dosage may vary within this range depending upon the dosage form employed and the route of administration utilized. For any compound used in the method of the invention, the therapeutically effective dose can be estimated initially from cell culture assays. A dose may be formulated in animal models to achieve a circulating plasma concentration range that includes the IC50 (i.e., the concentration of the test compound which achieves a half-maximal inhibition of symptoms) as determined in cell culture. Such information can be used to more accurately determine useful doses in humans. Levels in plasma may be measured, for example, by high performance liquid chromatography.

[1101] As defined herein, a therapeutically effective amount of protein or polypeptide (i.e., an effective dosage) ranges from about 0.001 to 30 mg/kg body weight, preferably about 0.01 to 25 mg/kg body weight, more preferably about 0.1 to 20 mg/kg body weight, and even more preferably about 1 to 10 mg/kg, 2 to 9 mg/kg, 3 to 8 mg/kg, 4 to 7 mg/kg, or 5 to 6 mg/kg body weight. The skilled artisan will appreciate that certain factors may influence the dosage required to effectively treat a subject, including but not limited to the severity of the disease or disorder, previous treatments, the general health and/or age of the subject, and other diseases present. Moreover, treatment of a subject with a therapeutically effective amount of a protein, polypeptide, or antibody can include a single treatment or, preferably, can include a series of treatments.

[1102] In a preferred example, a subject is treated with antibody, protein, or polypeptide in the range of between about 0.1 to 20 mg/kg body weight, one time per week for between about 1 to 10 weeks, preferably between 2 to 8 weeks, more preferably between about 3 to 7 weeks, and even more preferably for about 4, 5, or 6 weeks. It will also be appreciated that the effective dosage of antibody, protein, or polypeptide used for treatment may increase or decrease over the course of a particular treatment. Changes in dosage may result and become apparent from the results of diagnostic assays as described herein.

[1103] The present invention encompasses agents which modulate expression or activity. An agent may, for example, be a small molecule. For example, such small molecules include, but are not limited to, peptides, peptidomimetics, amino acids, amino acid analogs, polynucleotides, polynucleotide analogs, nucleotides, nucleotide analogs, organic or inorganic compounds (i.e., including heteroorganic and organometallic compounds) having a molecular weight less than about 10,000 grams per mole, organic or inorganic compounds having a molecular weight less than about 5,000 grams per mole, organic or inorganic compounds having a molecular weight less than about 1,000 grams per mole, organic or inorganic compounds having a molecular weight less than about 500 grams per mole, and salts, esters, and other pharmaceutically acceptable forms of such compounds. It is understood that appropriate doses of small molecule agents depends upon a number of factors within the ken of the ordinarily skilled physician, veterinarian, or researcher. The dose(s) of the small molecule will vary, for example, depending upon the identity, size, and condition of the subject or sample being treated, further depending upon the route by which the composition is to be administered, if applicable, and the effect which the practitioner desires the small molecule to have upon the nucleic acid or polypeptide of the invention.

[1104] Exemplary doses include milligram or microgram amounts of the small molecule per kilogram of subject or sample weight (e.g., about 1 microgram per kilogram to about 500 milligrams per kilogram, about 100 micrograms per kilogram to about 5 milligrams per kilogram, or about 1 microgram per kilogram to about 50 micrograms per kilogram. It is furthermore understood that appropriate doses of a small molecule depend upon the potency of the small molecule with respect to the expression or activity to be modulated. Such appropriate doses may be determined using the assays described herein. When one or more of these small molecules is to be administered to an animal (e.g., a human) in order to modulate expression or activity of a polypeptide or nucleic acid of the invention, a physician, veterinarian, or researcher may, for example, prescribe a relatively low dose at first, subsequently increasing the dose until an appropriate response is obtained. In addition, it is understood that the specific dose level for any particular animal subject will depend upon a variety of factors including the activity of the specific compound employed, the age, body weight, general health, gender, and diet of the subject, the time of administration, the route of administration, the rate of excretion, any drug combination, and the degree of expression or activity to be modulated.

[1105] Further, an antibody (or fragment thereof) may be conjugated to a therapeutic moiety such as a cytotoxin, a therapeutic agent or a radioactive metal ion. A cytotoxin or cytotoxic agent includes any agent that is detrimental to cells. Examples include taxol, cytochalasin B, gramicidin D, ethidium bromide, emetine, mitomycin, etoposide, tenoposide, vincristine, vinblastine, colchicin, doxorubicin, daunorubicin, dihydroxy anthracin dione, mitoxantrone, mithramycin, actinomycin D, 1-dehydrotestosterone, glucocorticoids, procaine, tetracaine, lidocaine, propranolol, and puromycin and analogs or homologs thereof. Therapeutic agents include, but are not limited to, antimetabolites (e.g., methotrexate, 6-mercaptopurine, 6-thioguanine, cytarabine, 5-fluorouracil decarbazine), alkylating agents (e.g., mechlorethamine, thioepa chlorambucil, melphalan, carmustine (BSNU) and lomustine (CCNU), cyclothosphamide, busulfan, dibromomannitol, streptozotocin, mitomycin C, and cis-dichlorodiamine platinum (II) (DDP) cisplatin), anthracyclines (e.g., daunorubicin (formerly daunomycin) and doxorubicin), antibiotics (e.g., dactinomycin (formerly actinomycin), bleomycin, mithramycin, and anthramycin (AMC)), and anti-mitotic agents (e.g., vincristine and vinblastine).

[1106] The conjugates of the invention can be used for modifying a given biological response, the drug moiety is not to be construed as limited to classical chemical therapeutic agents. For example, the drug moiety may be a protein or polypeptide possessing a desired biological activity. Such proteins may include, for example, a toxin such as abrin, ricin A, pseudomonas exotoxin, or diphtheria toxin; a protein such as tumor necrosis factor, alpha-interferon, beta-interferon, nerve growth factor, platelet derived growth factor, tissue plasminogen activator; or, biological response modifiers such as, for example, lymphokines, interleukin-1 (“IL-1”), interleukin-2 (“IL-2”), interleukin-6 (“IL-6”), granulocyte macrophage colony stimulating factor (“GM-CSF”), granulocyte colony stimulating factor (“G-CSF”), or other growth factors.

[1107] Techniques for conjugating such therapeutic moiety to antibodies are well known, see, e.g., Arnon et al., “Monoclonal Antibodies For Immunotargeting Of Drugs In Cancer Therapy”, in Monoclonal Antibodies And Cancer Therapy, Reisfeld et al. (eds.), pp. 243-56 (Alan R. Liss, Inc. 1985); Hellstrom et al., “Antibodies For Drug Delivery”, in Controlled Drug Delivery (2nd Ed.), Robinson et al. (eds.), pp. 623-53 (Marcel Dekker, Inc. 1987); Thorpe, “Antibody Carriers Of Cytotoxic Agents In Cancer Therapy: A Review”, in Monoclonal Antibodies '84: Biological And Clinical Applications, Pinchera et al. (eds.), pp. 475-506 (1985); “Analysis, Results, And Future Prospective Of The Therapeutic Use Of Radiolabeled Antibody In Cancer Therapy”, in Monoclonal Antibodies For Cancer Detection And Therapy, Baldwin et al. (eds.), pp. 303-16 (Academic Press 1985), and Thorpe et al., “The Preparation And Cytotoxic Properties Of Antibody-Toxin Conjugates”, Immunol. Rev., 62:119-58 (1982). Alternatively, an antibody can be conjugated to a second antibody to form an antibody heteroconjugate as described by Segal in U.S. Pat. No. 4,676,980.

[1108] The nucleic acid molecules of the invention can be inserted into vectors and used as gene therapy vectors. Gene therapy vectors can be delivered to a subject by, for example, intravenous injection, local administration (see U.S. Pat. No. 5,328,470) or by stereotactic injection (see e.g., Chen et al. (1994) Proc. Natl. Acad Sci. USA 91:3054-3057). The pharmaceutical preparation of the gene therapy vector can include the gene therapy vector in an acceptable diluent, or can comprise a slow release matrix in which the gene delivery vehicle is imbedded. Alternatively, where the complete gene delivery vector can be produced intact from recombinant cells, e.g., retroviral vectors, the pharmaceutical preparation can include one or more cells which produce the gene delivery system.

[1109] The pharmaceutical compositions can be included in a container, pack, or dispenser together with instructions for administration.

[1110] V. Uses and Methods of the Invention

[1111] The nucleic acid molecules, proteins, protein homologues, and antibodies described herein can be used in one or more of the following methods: a) screening assays; b) predictive medicine (e.g., diagnostic assays, prognostic assays, monitoring clinical trials, and pharmacogenetics); and c) methods of treatment (e.g., therapeutic and prophylactic). As described herein, a TWIK-8 protein of the invention has one or more of the following activities: (1) interacting with a non-TWIK protein molecule; (2) activating a TWIK-dependent signal transduction pathway; (3) modulating the release of neurotransmitters; (4) modulating membrane excitability; (5) influencing the resting potential of membranes, wave forms and frequencies of action potentials, and thresholds of excitation, (6) modulating processes which underlie learning and memory, such as integration of sub-threshold synaptic responses and the conductance of back-propagating action potentials, and (7) mediating nociception.

[1112] The isolated nucleic acid molecules of the invention can be used, for example, to express TWIK-8 protein (e.g., via a recombinant expression vector in a host cell in gene therapy applications), to detect TWIK-8 mRNA (e.g., in a biological sample) or a genetic alteration in a TWIK-8 gene, and to modulate TWIK-8 activity, as described further below. The TWIK-8 proteins can be used to treat disorders characterized by insufficient or excessive production of a TWIK-8 substrate or production of TWIK-8 inhibitors. In addition, the TWIK-8 proteins can be used to screen for naturally occurring TWIK-8 substrates, to screen for drugs or compounds which modulate TWIK-8 activity, as well as to treat disorders characterized by insufficient or excessive production of TWIK-8 protein or production of TWIK-8 protein forms which have decreased, aberrant or unwanted activity compared to TWIK-8 wild type protein, e.g., potassium channel associated disorders. Such disorders include CNS disorders such as cognitive and neurodegenerative disorders (e.g., Alzheimer's disease, dementias related to Alzheimer's disease (such as Pick's disease), Parkinson's and other Lewy diffuse body diseases, senile dementia, Huntington's disease, Gilles de la Tourette's syndrome, multiple sclerosis, amyotrophic lateral sclerosis, progressive supranuclear palsy, epilepsy, AIDS related dementia, and Jakob-Creutzfieldt disease; autonomic function disorders such as hypertension and sleep disorders, and neuropsychiatric disorders, such as depression, schizophrenia, schizoaffective disorder, korsakoff's psychosis, mania, anxiety disorders, or phobic disorders; learning or memory disorders, e.g., amnesia or age-related memory loss, attention deficit disorder, dysthymic disorder, major depressive disorder, mania, obsessive-compulsive disorder, psychoactive substance use disorders, anxiety, phobias, panic disorder, and bipolar affective disorder (e.g., severe bipolar affective (mood) disorder (BP-1) and bipolar affective neurological disorders (e.g., migraine and obesity)); cardiac disorders (e.g., arteriosclerosis, ischemia reperfusion injury, restenosis, arterial inflammation, vascular wall remodeling, ventricular remodeling, rapid ventricular pacing, coronary microembolism, tachycardia, bradycardia, pressure overload, aortic bending, coronary artery ligation, vascular heart disease, atrial fibrilation, Jervell syndrome, Lange-Nielsen syndrome, long-QT syndrome, congestive heart failure, sinus node dysfunction, angina, heart failure, hypertension, atrial fibrillation, atrial flutter, dilated cardiomyopathy, idiopathic cardiomyopathy, myocardial infarction, coronary artery disease, coronary artery spasm, and arrhythmia), muscular disorders (e.g., paralysis, muscle weakness (e.g., ataxia, myotonia, and myokymia), muscular dystrophy (e.g., Duchenne muscular dystrophy or myotonic dystrophy), spinal muscular atrophy, congenital myopathies, central core disease, rod myopathy, central nuclear myopathy, Lambert-Eaton syndrome, denervation, and infantile spinal muscular atrophy (Werdnig-Hoffman disease), pain disorders (e.g., headache (e.g., tension headache or migraine), back pain, cancer pain, arthritis pain, or neurogenic pain), and disorders of cellular growth, differentiation, or migration (e.g., cancer, e.g., carcinoma, sarcoma, or leukemia; tumor angiogenesis and metastasis; skeletal dysplasia; neuronal deficiencies resulting from impaired neural induction and patterning; and hematopoietic and/or myeloproliferative disorders. Moreover, the anti-TWIK-8 antibodies of the invention can be used to detect and isolate TWIK-8 proteins, to regulate the bioavailability of TWIK-8 proteins, and to modulate TWIK-8 activity.

[1113] A. Screening Assays:

[1114] The invention provides a method (also referred to herein as a “screening assay”) for identifying modulators, i.e., candidate or test compounds or agents (e.g., peptides, peptidomimetics, small molecules or other drugs) which bind to TWIK-8 proteins, have a stimulatory or inhibitory effect on, for example, TWIK-8 expression or TWIK-8 activity, or have a stimulatory or inhibitory effect on, for example, the expression or activity of TWIK-8 substrate.

[1115] In one embodiment, the invention provides assays for screening candidate or test compounds which are substrates of a TWIK-8 protein or polypeptide or biologically active portion thereof. In another embodiment, the invention provides assays for screening candidate or test compounds which bind to or modulate the activity of a TWIK-8 protein or polypeptide or biologically active portion thereof. The test compounds of the present invention can be obtained using any of the numerous approaches in combinatorial library methods known in the art, including: biological libraries; spatially addressable parallel solid phase or solution phase libraries; synthetic library methods requiring deconvolution; the ‘one-bead one-compound’ library method; and synthetic library methods using affinity chromatography selection. The biological library approach is limited to peptide libraries, while the other four approaches are applicable to peptide, non-peptide oligomer or small molecule libraries of compounds (Lam, K. S. (1997) Anticancer Drug Des. 12:145).

[1116] Examples of methods for the synthesis of molecular libraries can be found in the art, for example in: DeWitt et al. (1993) Proc. Natl. Acad. Sci. U.S.A. 90:6909; Erb et al. (1994) Proc. Natl. Acad. Sci. USA 91:11422; Zuckermann et al. (1994). J. Med. Chem. 37:2678; Cho et al. (1993) Science 261:1303; Carrell et al. (1994) Angew. Chem. Int. Ed. Engl. 33:2059; Carell et al. (1994) Angew. Chem. Int. Ed. Engl. 33:2061; and in Gallop et al. (1994) J. Med. Chem. 37:1233.

[1117] Libraries of compounds may be presented in solution (e.g., Houghten (1992) Biotechniques 13:412-421), or on beads (Lam (1991) Nature 354:82-84), chips (Fodor (1993) Nature 364:555-556), bacteria (Ladner U.S. Pat. No. 5,223,409), spores (Ladner U.S. Pat. No. '409), plasmids (Cull et al. (1992) Proc Natl Acad Sci USA 89:1865-1869) or on phage (Scott and Smith (1990) Science 249:386-390); (Devlin (1990) Science 249:404-406); (Cwirla et al. (1990) Proc. Natl. Acad. Sci. 87:6378-6382); (Felici (1991) J. Mol. Biol. 222:301-310); (Ladner supra.).

[1118] In one embodiment, an assay is a cell-based assay in which a cell which expresses a TWIK-8 protein or biologically active portion thereof is contacted with a test compound and the ability of the test compound to modulate TWIK-8 activity is determined. Determining the ability of the test compound to modulate TWIK-8 activity can be accomplished by monitoring, for example, the release of a neurotransmitter from a cell which expresses TWIK-8. The cell, for example, can be of mammalian origin, e.g., a neuronal cell, cardiac cell or a skin cell.

[1119] The ability of the test compound to modulate TWIK-8 binding to a substrate or to bind to TWIK-8 can also be determined. Determining the ability of the test compound to modulate TWIK-8 binding to a substrate can be accomplished, for example, by coupling the TWIK-8 substrate with a radioisotope or enzymatic label such that binding of the TWIK-8 substrate to TWIK-8 can be determined by detecting the labeled TWIK-8 substrate in a complex. Alternatively, TWIK-8 could be coupled with a radioisotope or enzymatic label to monitor the ability of a test compound to modulate TWIK-8 binding to a TWIK-8 substrate in a complex. Determining the ability of the test compound to bind TWIK-8 can be accomplished, for example, by coupling the compound with a radioisotope or enzymatic label such that binding of the compound to TWIK-8 can be determined by detecting the labeled TWIK-8 compound in a complex. For example, compounds (e.g., TWIK-8 substrates) can be labeled with ¹²⁵I, ³⁵S, ¹⁴C, or ³H, either directly or indirectly, and the radioisotope detected by direct counting of radioemission or by scintillation counting. Alternatively, compounds can be enzymatically labeled with, for example, horseradish peroxidase, alkaline phosphatase, or luciferase, and the enzymatic label detected by determination of conversion of an appropriate substrate to product.

[1120] It is also within the scope of this invention to determine the ability of a compound (e.g., a TWIK-8 substrate) to interact with TWIK-8 without the labeling of any of the interactants. For example, a microphysiometer can be used to detect the interaction of a compound with TWIK-8 without the labeling of either the compound or the TWIK-8. McConnell, H. M. et al. (1992) Science 257:1906-1912. As used herein, a “microphysiometer” (e.g., Cytosensor) is an analytical instrument that measures the rate at which a cell acidifies its environment using a light-addressable potentiometric sensor (LAPS). Changes in this acidification rate can be used as an indicator of the interaction between a compound and TWIK-8.

[1121] In another embodiment, an assay is a cell-based assay comprising contacting a cell expressing a TWIK-8 target molecule (e.g., a TWIK-8 substrate) with a test compound and determining the ability of the test compound to modulate (e.g., stimulate or inhibit) the activity of the TWIK-8 target molecule. Determining the ability of the test compound to modulate the activity of a TWIK-8 target molecule can be accomplished, for example, by determining the ability of the TWIK-8 protein to bind to or interact with the TWIK-8 target molecule.

[1122] Determining the ability of the TWIK-8 protein, or a biologically active fragment thereof, to bind to or interact with a TWIK-8 target molecule can be accomplished by one of the methods described above for determining direct binding. In a preferred embodiment, determining the ability of the TWIK-8 protein to bind to or interact with a TWIK-8 target molecule can be accomplished by determining the activity of the target molecule. For example, the activity of the target molecule can be determined by detecting induction of a cellular response (i.e., changes in intracellular K⁺ levels), detecting catalytic/enzymatic activity of the target on an appropriate substrate, detecting the induction of a reporter gene (comprising a target-responsive regulatory element operatively linked to a nucleic acid encoding a detectable marker, e.g., luciferase), or detecting a target-regulated cellular response.

[1123] In yet another embodiment, an assay of the present invention is a cell-free assay in which a TWIK-8 protein or biologically active portion thereof is contacted with a test compound and the ability of the test compound to bind to the TWIK-8 protein or biologically active portion thereof is determined. Preferred biologically active portions of the TWIK-8 proteins to be used in assays of the present invention include fragments which participate in interactions with non-TWIK-8 molecules, e.g., fragments with high surface probability scores. Binding of the test compound to the TWIK-8 protein can be determined either directly or indirectly as described above. In a preferred embodiment, the assay includes contacting the TWIK-8 protein or biologically active portion thereof with a known compound which binds TWIK-8 to form an assay mixture, contacting the assay mixture with a test compound, and determining the ability of the test compound to interact with a TWIK-8 protein, wherein determining the ability of the test compound to interact with a TWIK-8 protein comprises determining the ability of the test compound to preferentially bind to TWIK-8 or biologically active portion thereof as compared to the known compound.

[1124] In another embodiment, the assay is a cell-free assay in which a TWIK-8 protein or biologically active portion thereof is contacted with a test compound and the ability of the test compound to modulate (e.g., stimulate or inhibit) the activity of the TWIK-8 protein or biologically active portion thereof is determined. Determining the ability of the test compound to modulate the activity of a TWIK-8 protein can be accomplished, for example, by determining the ability of the TWIK-8 protein to bind to a TWIK-8 target molecule by one of the methods described above for determining direct binding. Determining the ability of the TWIK-8 protein to bind to a TWIK-8 target molecule can also be accomplished using a technology such as real-time Biomolecular Interaction Analysis (BIA). Sjolander, S. and Urbaniczky, C. (1991) Anal. Chem. 63:2338-2345 and Szabo et al. (1995) Curr. Opin. Struct. Biol. 5:699-705. As used herein, “BIA” is a technology for studying biospecific interactions in real time, without labeling any of the interactants (e.g., BIAcore). Changes in the optical phenomenon of surface plasmon resonance (SPR) can be used as an indication of real-time reactions between biological molecules.

[1125] In an alternative embodiment, determining the ability of the test compound to modulate the activity of a TWIK-8 protein can be accomplished by determining the ability of the TWIK-8 protein to further modulate the activity of a downstream effector of a TWIK-8 target molecule. For example, the activity of the effector molecule on an appropriate target can be determined or the binding of the effector to an appropriate target can be determined as previously described.

[1126] In yet another embodiment, the cell-free assay involves contacting a TWIK-8 protein or biologically active portion thereof with a known compound which binds the TWIK-8 protein to form an assay mixture, contacting the assay mixture with a test compound, and determining the ability of the test compound to interact with the TWIK-8 protein, wherein determining the ability of the test compound to interact with the TWIK-8 protein comprises determining the ability of the TWIK-8 protein to preferentially bind to or modulate the activity of a TWIK-8 target molecule.

[1127] In more than one embodiment of the above assay methods of the present invention, it may be desirable to immobilize either TWIK-8 or its target molecule to facilitate separation of complexed from uncomplexed forms of one or both of the proteins, as well as to accommodate automation of the assay. Binding of a test compound to a TWIK-8 protein, or interaction of a TWIK-8 protein with a target molecule in the presence and absence of a candidate compound, can be accomplished in any vessel suitable for containing the reactants. Examples of such vessels include microtitre plates, test tubes, and micro-centrifuge tubes. In one embodiment, a fusion protein can be provided which adds a domain that allows one or both of the proteins to be bound to a matrix. For example, glutathione-S-transferase/TWIK-8 fusion proteins or glutathione-S-transferase/target fusion proteins can be adsorbed onto glutathione sepharose beads (Sigma Chemical, St. Louis, Mo.) or glutathione derivatized microtitre plates, which are then combined with the test compound or the test compound and either the non-adsorbed target protein or TWIK-8 protein, and the mixture incubated under conditions conducive to complex formation (e.g., at physiological conditions for salt and pH). Following incubation, the beads or microtitre plate wells are washed to remove any unbound components, the matrix immobilized in the case of beads, complex determined either directly or indirectly, for example, as described above. Alternatively, the complexes can be dissociated from the matrix, and the level of TWIK-8 binding or activity determined using standard techniques.

[1128] Other techniques for immobilizing proteins on matrices can also be used in the screening assays of the invention. For example, either a TWIK-8 protein or a TWIK-8 target molecule can be immobilized utilizing conjugation of biotin and streptavidin. Biotinylated TWIK-8 protein or target molecules can be prepared from biotin-NHS (N-hydroxy-succinimide) using techniques known in the art (e.g., biotinylation kit, Pierce Chemicals, Rockford, Ill.), and immobilized in the wells of streptavidin-coated 96 well plates (Pierce Chemical). Alternatively, antibodies reactive with TWIK-8 protein or target molecules but which do not interfere with binding of the TWIK-8 protein to its target molecule can be derivatized to the wells of the plate, and unbound target or TWIK-8 protein trapped in the wells by antibody conjugation. Methods for detecting such complexes, in addition to those described above for the GST-immobilized complexes, include immunodetection of complexes using antibodies reactive with the TWIK-8 protein or target molecule, as well as enzyme-linked assays which rely on detecting an enzymatic activity associated with the TWIK-8 protein or target molecule.

[1129] In another embodiment, modulators of TWIK-8 expression are identified in a method wherein a cell is contacted with a candidate compound and the expression of TWIK-8 mRNA or protein in the cell is determined. The level of expression of TWIK-8 mRNA or protein in the presence of the candidate compound is compared to the level of expression of TWIK-8 mRNA or protein in the absence of the candidate compound. The candidate compound can then be identified as a modulator of TWIK-8 expression based on this comparison. For example, when expression of TWIK-8 mRNA or protein is greater (statistically significantly greater) in the presence of the candidate compound than in its absence, the candidate compound is identified as a stimulator of TWIK-8 mRNA or protein expression. Alternatively, when expression of TWIK-8 mRNA or protein is less (statistically significantly less) in the presence of the candidate compound than in its absence, the candidate compound is identified as an inhibitor of TWIK-8 mRNA or protein expression. The level of TWIK-8 mRNA or protein expression in the cells can be determined by methods described herein for detecting TWIK-8 mRNA or protein.

[1130] In yet another aspect of the invention, the TWIK-8 proteins can be used as “bait proteins” in a two-hybrid assay or three-hybrid assay (see, e.g., U.S. Pat. No. 5,283,317; Zervos et al. (1993) Cell 72:223-232; Madura et al. (1993) J. Biol. Chem. 268:12046-12054; Bartel et al. (1993) Biotechniques 14:920-924; Iwabuchi et al. (1993) Oncogene 8:1693-1696; and Brent WO94/10300), to identify other proteins, which bind to or interact with TWIK-8 (“TWIK-8-binding proteins” or “TWIK-8-bp”) and are involved in TWIK-8 activity. Such TWIK-8-binding proteins are also likely to be involved in the propagation of signals by the TWIK-8 proteins or TWIK-8 targets as, for example, downstream elements of a TWIK-8-mediated signaling pathway. Alternatively, such TWIK-8-binding proteins are likely to be TWIK-8 inhibitors.

[1131] The two-hybrid system is based on the modular nature of most transcription factors, which consist of separable DNA-binding and activation domains. Briefly, the assay utilizes two different DNA constructs. In one construct, the gene that codes for a TWIK-8 protein is fused to a gene encoding the DNA binding domain of a known transcription factor (e.g., GAL-4). In the other construct, a DNA sequence, from a library of DNA sequences, that encodes an unidentified protein (“prey” or “sample”) is fused to a gene that codes for the activation domain of the known transcription factor. If the “bait” and the “prey” proteins are able to interact, in vivo, forming a TWIK-8-dependent complex, the DNA-binding and activation domains of the transcription factor are brought into close proximity. This proximity allows transcription of a reporter gene (e.g., LacZ) which is operably linked to a transcriptional regulatory site responsive to the transcription factor. Expression of the reporter gene can be detected and cell colonies containing the functional transcription factor can be isolated and used to obtain the cloned gene which encodes the protein which interacts with the TWIK-8 protein.

[1132] In another aspect, the invention pertains to a combination of two or more of the assays described herein. For example, a modulating agent can be identified using a cell-based or a cell free assay, and the ability of the agent to modulate the activity of a TWIK-8 protein can be confirmed in vivo, e.g., in an animal such as an animal model for pain.

[1133] This invention further pertains to novel agents identified by the above-described screening assays. Accordingly, it is within the scope of this invention to further use an agent identified as described herein in an appropriate animal model. For example, an agent identified as described herein (e.g., a TWIK-8 modulating agent, an antisense TWIK-8 nucleic acid molecule, a TWIK-8-specific antibody, or a TWIK-8-binding partner) can be used in an animal model to determine the efficacy, toxicity, or side effects of treatment with such an agent. Alternatively, an agent identified as described herein can be used in an animal model to determine the mechanism of action of such an agent. Furthermore, this invention pertains to uses of novel agents identified by the above-described screening assays for treatments as described herein.

[1134] B. Detection Assays

[1135] Portions or fragments of the cDNA sequences identified herein (and the corresponding complete gene sequences) can be used in numerous ways as polynucleotide reagents. For example, these sequences can be used to: (i) map their respective genes on a chromosome; and, thus, locate gene regions associated with genetic disease; (ii) identify an individual from a minute biological sample (tissue typing); and (iii) aid in forensic identification of a biological sample. These applications are described in the subsections below.

[1136] 1. Chromosome Mapping

[1137] Once the sequence (or a portion of the sequence) of a gene has been isolated, this sequence can be used to map the location of the gene on a chromosome. This process is called chromosome mapping. Accordingly, portions or fragments of the TWIK-8 nucleotide sequences, described herein, can be used to map the location of the TWIK-8 genes on a chromosome. The mapping of the TWIK-8 sequences to chromosomes is an important first step in correlating these sequences with genes associated with disease.

[1138] Briefly, TWIK-8 genes can be mapped to chromosomes by preparing PCR primers (preferably 15-25 bp in length) from the TWIK-8 nucleotide sequences. Computer analysis of the TWIK-8 sequences can be used to predict primers that do not span more than one exon in the genomic DNA, thus complicating the amplification process. These primers can then be used for PCR screening of somatic cell hybrids containing individual human chromosomes. Only those hybrids containing the human gene corresponding to the TWIK-8 sequences will yield an amplified fragment.

[1139] Somatic cell hybrids are prepared by fusing somatic cells from different mammals (e.g., human and mouse cells). As hybrids of human and mouse cells grow and divide, they gradually lose human chromosomes in random order, but retain the mouse chromosomes. By using media in which mouse cells cannot grow, because they lack a particular enzyme, but human cells can, the one human chromosome that contains the gene encoding the needed enzyme, will be retained. By using various media, panels of hybrid cell lines can be established. Each cell line in a panel contains either a single human chromosome or a small number of human chromosomes, and a full set of mouse chromosomes, allowing easy mapping of individual genes to specific human chromosomes. (D'Eustachio P. et al. (1983) Science 220:919-924). Somatic cell hybrids containing only fragments of human chromosomes can also be produced by using human chromosomes with translocations and deletions.

[1140] PCR mapping of somatic cell hybrids is a rapid procedure for assigning a particular sequence to a particular chromosome. Three or more sequences can be assigned per day using a single thermal cycler. Using the TWIK-8 nucleotide sequences to design oligonucleotide primers, sublocalization can be achieved with panels of fragments from specific chromosomes. Other mapping strategies which can similarly be used to map a TWIK-8 sequence to its chromosome include in situ hybridization (described in Fan, Y. et al. (1990) Proc. Natl. Acad. Sci. USA, 87:6223-27), pre-screening with labeled flow-sorted chromosomes, and pre-selection by hybridization to chromosome specific cDNA libraries.

[1141] Fluorescence in situ hybridization (FISH) of a DNA sequence to a metaphase chromosomal spread can further be used to provide a precise chromosomal location in one step. Chromosome spreads can be made using cells whose division has been blocked in metaphase by a chemical such as colcemid that disrupts the mitotic spindle. The chromosomes can be treated briefly with trypsin, and then stained with Giemsa. A pattern of light and dark bands develops on each chromosome, so that the chromosomes can be identified individually. The FISH technique can be used with a DNA sequence as short as 500 or 600 bases. However, clones larger than 1,000 bases have a higher likelihood of binding to a unique chromosomal location with sufficient signal intensity for simple detection. Preferably 1,000 bases, and more preferably 2,000 bases will suffice to get good results at a reasonable amount of time. For a review of this technique, see Verma et al., Human Chromosomes: A Manual of Basic Techniques (Pergamon Press, New York 1988).

[1142] Reagents for chromosome mapping can be used individually to mark a single chromosome or a single site on that chromosome, or panels of reagents can be used for marking multiple sites and/or multiple chromosomes. Reagents corresponding to noncoding regions of the genes actually are preferred for mapping purposes. Coding sequences are more likely to be conserved within gene families, thus increasing the chance of cross hybridizations during chromosomal mapping.

[1143] Once a sequence has been mapped to a precise chromosomal location, the physical position of the sequence on the chromosome can be correlated with genetic map data. (Such data are found, for example, in V. McKusick, Mendelian Inheritance in Man, available on-line through Johns Hopkins University Welch Medical Library). The relationship between a gene and a disease, mapped to the same chromosomal region, can then be identified through linkage analysis (co-inheritance of physically adjacent genes), described in, for example, Egeland, J. et al. (1987) Nature, 325:783-787.

[1144] Moreover, differences in the DNA sequences between individuals affected and unaffected with a disease associated with the TWIK-8 gene can be determined. If a mutation is observed in some or all of the affected individuals but not in any unaffected individuals, then the mutation is likely to be the causative agent of the particular disease. Comparison of affected and unaffected individuals generally involves first looking for structural alterations in the chromosomes, such as deletions or translocations that are visible from chromosome spreads or detectable using PCR based on that DNA sequence. Ultimately, complete sequencing of genes from several individuals can be performed to confirm the presence of a mutation and to distinguish mutations from polymorphisms.

[1145] 2. Tissue Typing

[1146] The TWIK-8 sequences of the present invention can also be used to identify individuals from minute biological samples. The United States military, for example, is considering the use of restriction fragment length polymorphism (RFLP) for identification of its personnel. In this technique, an individual's genomic DNA is digested with one or more restriction enzymes, and probed on a Southern blot to yield unique bands for identification. This method does not suffer from the current limitations of “Dog Tags” which can be lost, switched, or stolen, making positive identification difficult. The sequences of the present invention are useful as additional DNA markers for RFLP (described in U.S. Pat. No. 5,272,057).

[1147] Furthermore, the sequences of the present invention can be used to provide an alternative technique which determines the actual base-by-base DNA sequence of selected portions of an individual's genome. Thus, the TWIK-8 nucleotide sequences described herein can be used to prepare two PCR primers from the 5′ and 3′ ends of the sequences. These primers can then be used to amplify an individual's DNA and subsequently sequence it.

[1148] Panels of corresponding DNA sequences from individuals, prepared in this manner, can provide unique individual identifications, as each individual will have a unique set of such DNA sequences due to allelic differences. The sequences of the present invention can be used to obtain such identification sequences from individuals and from tissue. The TWIK-8 nucleotide sequences of the invention uniquely represent portions of the human genome. Allelic variation occurs to some degree in the coding regions of these sequences, and to a greater degree in the noncoding regions. It is estimated that allelic variation between individual humans occurs with a frequency of about once per each 500 bases. Each of the sequences described herein can, to some degree, be used as a standard against which DNA from an individual can be compared for identification purposes. Because greater numbers of polymorphisms occur in the noncoding regions, fewer sequences are necessary to differentiate individuals. The noncoding sequences of SEQ ID NO:28 can comfortably provide positive individual identification with a panel of perhaps 10 to 1,000 primers which each yield a noncoding amplified sequence of 100 bases. If predicted coding sequences, such as those in SEQ ID NO:30 are used, a more appropriate number of primers for positive individual identification would be 500-2,000.

[1149] If a panel of reagents from TWIK-8 nucleotide sequences described herein is used to generate a unique identification database for an individual, those same reagents can later be used to identify tissue from that individual. Using the unique identification database, positive identification of the individual, living or dead, can be made from extremely small tissue samples.

[1150] 3. Use of TWIK-8 Sequences in Forensic Biology

[1151] DNA-based identification techniques can also be used in forensic biology. Forensic biology is a scientific field employing genetic typing of biological evidence found at a crime scene as a means for positively identifying, for example, a perpetrator of a crime. To make such an identification, PCR technology can be used to amplify DNA sequences taken from very small biological samples such as tissues, e.g., hair or skin, or body fluids, e.g., blood, saliva, or semen found at a crime scene. The amplified sequence can then be compared to a standard, thereby allowing identification of the origin of the biological sample.

[1152] The sequences of the present invention can be used to provide polynucleotide reagents, e.g., PCR primers, targeted to specific loci in the human genome, which can enhance the reliability of DNA-based forensic identifications by, for example, providing another “identification marker” (i.e. another DNA sequence that is unique to a particular individual). As mentioned above, actual base sequence information can be used for identification as an accurate alternative to patterns formed by restriction enzyme generated fragments. Sequences targeted to noncoding regions of SEQ ID NO:28 are particularly appropriate for this use as greater numbers of polymorphisms occur in the noncoding regions, making it easier to differentiate individuals using this technique. Examples of polynucleotide reagents include the TWIK-8 nucleotide sequences or portions thereof, e.g., fragments derived from the noncoding regions of SEQ ID NO:28 having a length of at least 20 bases, preferably at least 30 bases.

[1153] The TWIK-8 nucleotide sequences described herein can further be used to provide polynucleotide reagents, e.g., labeled or labelable probes which can be used in, for example, an in situ hybridization technique, to identify a specific tissue, e.g., brain tissue. This can be very useful in cases where a forensic pathologist is presented with a tissue of unknown origin. Panels of such TWIK-8 probes can be used to identify tissue by species and/or by organ type.

[1154] In a similar fashion, these reagents, e.g., TWIK-8 primers or probes can be used to screen tissue culture for contamination (i.e. screen for the presence of a mixture of different types of cells in a culture).

[1155] C. Predictive Medicine:

[1156] The present invention also pertains to the field of predictive medicine in which diagnostic assays, prognostic assays, and monitoring clinical trials are used for prognostic (predictive) purposes to thereby treat an individual prophylactically. Accordingly, one aspect of the present invention relates to diagnostic assays for determining TWIK-8 protein and/or nucleic acid expression as well as TWIK-8 activity, in the context of a biological sample (e.g., blood, serum, cells, tissue) to thereby determine whether an individual is afflicted with a disease or disorder, or is at risk of developing a disorder, associated with aberrant or unwanted TWIK-8 expression or activity. The invention also provides for prognostic (or predictive) assays for determining whether an individual is at risk of developing a disorder associated with TWIK-8 protein, nucleic acid expression or activity. For example, mutations in a TWIK-8 gene can be assayed in a biological sample. Such assays can be used for prognostic or predictive purpose to thereby prophylactically treat an individual prior to the onset of a disorder characterized by or associated with TWIK-8 protein, nucleic acid expression or activity.

[1157] Another aspect of the invention pertains to monitoring the influence of agents (e.g., drugs, compounds) on the expression or activity of TWIK-8 in clinical trials.

[1158] These and other agents are described in further detail in the following sections.

[1159] 1. Diagnostic Assays

[1160] An exemplary method for detecting the presence or absence of TWIK-8 protein or nucleic acid in a biological sample involves obtaining a biological sample from a test subject and contacting the biological sample with a compound or an agent capable of detecting TWIK-8 protein or nucleic acid (e.g., mRNA, or genomic DNA) that encodes TWIK-8 protein such that the presence of TWIK-8 protein or nucleic acid is detected in the biological sample. A preferred agent for detecting TWIK-8 mRNA or genomic DNA is a labeled nucleic acid probe capable of hybridizing to TWIK-8 mRNA or genomic DNA. The nucleic acid probe can be, for example, the TWIK-8 nucleic acid set forth in SEQ ID NO:28 or 30, or the DNA insert of the plasmid deposited with ATCC as Accession Number ______, or a portion thereof, such as an oligonucleotide of at least 15, 30, 50, 100, 250 or 500 nucleotides in length and sufficient to specifically hybridize under stringent conditions to TWIK-8 mRNA or genomic DNA. Other suitable probes for use in the diagnostic assays of the invention are described herein.

[1161] A preferred agent for detecting TWIK-8 protein is an antibody capable of binding to TWIK-8 protein, preferably an antibody with a detectable label. Antibodies can be polyclonal, or more preferably, monoclonal. An intact antibody, or a fragment thereof (e.g., Fab or F(ab′)₂) can be used. The term “labeled”, with regard to the probe or antibody, is intended to encompass direct labeling of the probe or antibody by coupling (i.e., physically linking) a detectable substance to the probe or antibody, as well as indirect labeling of the probe or antibody by reactivity with another reagent that is directly labeled. Examples of indirect labeling include detection of a primary antibody using a fluorescently labeled secondary antibody and end-labeling of a DNA probe with biotin such that it can be detected with fluorescently labeled streptavidin. The term “biological sample” is intended to include tissues, cells and biological fluids isolated from a subject, as well as tissues, cells and fluids present within a subject. That is, the detection method of the invention can be used to detect TWIK-8 mRNA, protein, or genomic DNA in a biological sample in vitro as well as in vivo. For example, in vitro techniques for detection of TWIK-8 mRNA include Northern hybridizations and in situ hybridizations. In vitro techniques for detection of TWIK-8 protein include enzyme linked immunosorbent assays (ELISAs), Western blots, immunoprecipitations and immunofluorescence. In vitro techniques for detection of TWIK-8 genomic DNA include Southern hybridizations. Furthermore, in vivo techniques for detection of TWIK-8 protein include introducing into a subject a labeled anti-TWIK-8 antibody. For example, the antibody can be labeled with a radioactive marker whose presence and location in a subject can be detected by standard imaging techniques.

[1162] In one embodiment, the biological sample contains protein molecules from the test subject. Alternatively, the biological sample can contain mRNA molecules from the test subject or genomic DNA molecules from the test subject. A preferred biological sample is a serum sample isolated by conventional means from a subject.

[1163] In another embodiment, the methods further involve obtaining a control biological sample from a control subject, contacting the control sample with a compound or agent capable of detecting TWIK-8 protein, mRNA, or genomic DNA, such that the presence of TWIK-8 protein, mRNA or genomic DNA is detected in the biological sample, and comparing the presence of TWIK-8 protein, mRNA or genomic DNA in the control sample with the presence of TWIK-8 protein, mRNA or genomic DNA in the test sample.

[1164] The invention also encompasses kits for detecting the presence of TWIK-8 in a biological sample. For example, the kit can comprise a labeled compound or agent capable of detecting TWIK-8 protein or mRNA in a biological sample; means for determining the amount of TWIK-8 in the sample; and means for comparing the amount of TWIK-8 in the sample with a standard. The compound or agent can be packaged in a suitable container. The kit can further comprise instructions for using the kit to detect TWIK-8 protein or nucleic acid.

[1165] 2. Prognostic Assays

[1166] The diagnostic methods described herein can furthermore be utilized to identify subjects having or at risk of developing a disease or disorder associated with aberrant or unwanted TWIK-8 expression or activity. As used herein, the term “aberrant” includes a TWIK-8 expression or activity which deviates from the wild type TWIK-8 expression or activity. Aberrant expression or activity includes increased or decreased expression or activity, as well as expression or activity which does not follow the wild type developmental pattern of expression or the subcellular pattern of expression. For example, aberrant TWIK-8 expression or activity is intended to include the cases in which a mutation in the TWIK-8 gene causes the TWIK-8 gene to be under-expressed or over-expressed and situations in which such mutations result in a non-functional TWIK-8 protein or a protein which does not function in a wild-type fashion, e.g., a protein which does not interact with a TWIK-8 substrate, e.g., a non-potassium channel subunit or ligand, or one which interacts with a non-TWIK-8 substrate, e.g. a non-potassium channel subunit or ligand. As used herein, the term “unwanted” includes an unwanted phenomenon involved in a biological response such as cellular proliferation. For example, the term unwanted includes a TWIK-8 expression or activity which is undesirable in a subject.

[1167] The assays described herein, such as the preceding diagnostic assays or the following assays, can be utilized to identify a subject having or at risk of developing a disorder associated with a misregulation in TWIK-8 protein activity or nucleic acid expression, such as a CNS disorder (e.g., a cognitive or neurodegenerative disorder, or a pain disorder), a muscular disorder, a cellular proliferation, growth, differentiation, or migration disorder, or a cardiovascular disorder. Alternatively, the prognostic assays can be utilized to identify a subject having or at risk for developing a disorder associated with a misregulation in TWIK-8 protein activity or nucleic acid expression, such as a CNS disorder, a cardiovascular disorder, a pain disorder, or a cellular proliferation, growth, differentiation, or migration disorder. Thus, the present invention provides a method for identifying a disease or disorder associated with aberrant or unwanted TWIK-8 expression or activity in which a test sample is obtained from a subject and TWIK-8 protein or nucleic acid (e.g., mRNA or genomic DNA) is detected, wherein the presence of TWIK-8 protein or nucleic acid is diagnostic for a subject having or at risk of developing a disease or disorder associated with aberrant or unwanted TWIK-8 expression or activity. As used herein, a “test sample” refers to a biological sample obtained from a subject of interest. For example, a test sample can be a biological fluid (e.g., cerebrospinal fluid or serum), cell sample, or tissue.

[1168] Furthermore, the prognostic assays described herein can be used to determine whether a subject can be administered an agent (e.g., an agonist, antagonist, peptidomimetic, protein, peptide, nucleic acid, small molecule, or other drug candidate) to treat a disease or disorder associated with aberrant or unwanted TWIK-8 expression or activity. For example, such methods can be used to determine whether a subject can be effectively treated with an agent for a CNS disorder, a muscular disorder, a pain disorder, a cardiovascular, or a cellular proliferation, growth, differentiation, or migration disorder. Thus, the present invention provides methods for determining whether a subject can be effectively treated with an agent for a disorder associated with aberrant or unwanted TWIK-8 expression or activity in which a test sample is obtained and TWIK-8 protein or nucleic acid expression or activity is detected (e.g., wherein the abundance of TWIK-8 protein or nucleic acid expression or activity is diagnostic for a subject that can be administered the agent to treat a disorder associated with aberrant or unwanted TWIK-8 expression or activity).

[1169] The methods of the invention can also be used to detect genetic alterations in a TWIK-8 gene, thereby determining if a subject with the altered gene is at risk for a disorder characterized by misregulation in TWIK-8 protein activity or nucleic acid expression, such as a CNS disorder, a cardiovascular disorder, a pain disorder, or a disorder of cellular growth, differentiation, or migration. In preferred embodiments, the methods include detecting, in a sample of cells from the subject, the presence or absence of a genetic alteration characterized by at least one of an alteration affecting the integrity of a gene encoding a TWIK-8-protein, or the mis-expression of the TWIK-8 gene. For example, such genetic alterations can be detected by ascertaining the existence of at least one of 1) a deletion of one or more nucleotides from a TWIK-8 gene; 2) an addition of one or more nucleotides to a TWIK-8 gene; 3) a substitution of one or more nucleotides of a TWIK-8 gene, 4) a chromosomal rearrangement of a TWIK-8 gene; 5) an alteration in the level of a messenger RNA transcript of a TWIK-8 gene, 6) aberrant modification of a TWIK-8 gene, such as of the methylation pattern of the genomic DNA, 7) the presence of a non-wild type splicing pattern of a messenger RNA transcript of a TWIK-8 gene, 8) a non-wild type level of a TWIK-8-protein, 9) allelic loss of a TWIK-8 gene, and 10) inappropriate post-translational modification of a TWIK-8-protein. As described herein, there are a large number of assays known in the art which can be used for detecting alterations in a TWIK-8 gene. A preferred biological sample is a tissue or serum sample isolated by conventional means from a subject.

[1170] In certain embodiments, detection of the alteration involves the use of a probe/primer in a polymerase chain reaction (PCR) (see, e.g., U.S. Pat. Nos. 4,683,195 and 4,683,202), such as anchor PCR or RACE PCR, or, alternatively, in a ligation chain reaction (LCR) (see, e.g., Landegran et al. (1988) Science 241:1077-1080; and Nakazawa et al. (1994) Proc. Natl. Acad. Sci. USA 91:360-364), the latter of which can be particularly useful for detecting point mutations in the TWIK-8-gene (see Abravaya et al. (1995) Nucleic Acids Res. 23:675-682). This method can include the steps of collecting a sample of cells from a subject, isolating nucleic acid (e.g., genomic, mRNA or both) from the cells of the sample, contacting the nucleic acid sample with one or more primers which specifically hybridize to a TWIK-8 gene under conditions such that hybridization and amplification of the TWIK-8-gene (if present) occurs, and detecting the presence or absence of an amplification product, or detecting the size of the amplification product and comparing the length to a control sample. It is anticipated that PCR and/or LCR may be desirable to use as a preliminary amplification step in conjunction with any of the techniques used for detecting mutations described herein.

[1171] Alternative amplification methods include: self sustained sequence replication (Guatelli, J. C. et al., (1990) Proc. Natl. Acad. Sci. USA 87:1874-1878), transcriptional amplification system (Kwoh, D. Y. et al., (1989) Proc. Natl. Acad. Sci. USA 86:1173-1177), Q-Beta Replicase (Lizardi, P. M. et al. (1988) Bio-Technology 6:1197), or any other nucleic acid amplification method, followed by the detection of the amplified molecules using techniques well known to those of skill in the art. These detection schemes are especially useful for the detection of nucleic acid molecules if such molecules are present in very low numbers.

[1172] In an alternative embodiment, mutations in a TWIK-8 gene from a sample cell can be identified by alterations in restriction enzyme cleavage patterns. For example, sample and control DNA is isolated, amplified (optionally), digested with one or more restriction endonucleases, and fragment length sizes are determined by gel electrophoresis and compared. Differences in fragment length sizes between sample and control DNA indicates mutations in the sample DNA. Moreover, the use of sequence specific ribozymes (see, for example, U.S. Pat. No. 5,498,531) can be used to score for the presence of specific mutations by development or loss of a ribozyme cleavage site.

[1173] In other embodiments, genetic mutations in TWIK-8 can be identified by hybridizing a sample and control nucleic acids, e.g., DNA or RNA, to high density arrays containing hundreds or thousands of oligonucleotides probes (Cronin, M. T. et al. (1996) Human Mutation 7: 244-255; Kozal, M. J. et al. (1996) Nature Medicine 2: 753-759). For example, genetic mutations in TWIK-8 can be identified in two dimensional arrays containing light-generated DNA probes as described in Cronin, M. T. et al. supra. Briefly, a first hybridization array of probes can be used to scan through long stretches of DNA in a sample and control to identify base changes between the sequences by making linear arrays of sequential overlapping probes. This step allows the identification of point mutations. This step is followed by a second hybridization array that allows the characterization of specific mutations by using smaller, specialized probe arrays complementary to all variants or mutations detected. Each mutation array is composed of parallel probe sets, one complementary to the wild-type gene and the other complementary to the mutant gene.

[1174] In yet another embodiment, any of a variety of sequencing reactions known in the art can be used to directly sequence the TWIK-8 gene and detect mutations by comparing the sequence of the sample TWIK-8 with the corresponding wild-type (control) sequence. Examples of sequencing reactions include those based on techniques developed by Maxam and Gilbert ((1977) Proc. Natl. Acad. Sci. USA 74:560) or Sanger ((1977) Proc. Natl. Acad. Sci. USA 74:5463). It is also contemplated that any of a variety of automated sequencing procedures can be utilized when performing the diagnostic assays ((1995) Biotechniques 19:448), including sequencing by mass spectrometry (see, e.g., PCT International Publication No. WO 94/16101; Cohen et al. (1996) Adv. Chromatogr. 36:127-162; and Griffin et al. (1993) Appl. Biochem. Biotechnol. 38:147-159).

[1175] Other methods for detecting mutations in the TWIK-8 gene include methods in which protection from cleavage agents is used to detect mismatched bases in RNA/RNA or RNA/DNA heteroduplexes (Myers et al. (1985) Science 230:1242). In general, the art technique of “mismatch cleavage” starts by providing heteroduplexes of formed by hybridizing (labeled) RNA or DNA containing the wild-type TWIK-8 sequence with potentially mutant RNA or DNA obtained from a tissue sample. The double-stranded duplexes are treated with an agent which cleaves single-stranded regions of the duplex such as which will exist due to basepair mismatches between the control and sample strands. For instance, RNA/DNA duplexes can be treated with RNase and DNA/DNA hybrids treated with S1 nuclease to enzymatically digesting the mismatched regions. In other embodiments, either DNA/DNA or RNA/DNA duplexes can be treated with hydroxylamine or osmium tetroxide and with piperidine in order to digest mismatched regions. After digestion of the mismatched regions, the resulting material is then separated by size on denaturing polyacrylamide gels to determine the site of mutation. See, for example, Cotton et al. (1988) Proc. Natl Acad Sci USA 85:4397; Saleeba et al. (1992) Methods Enzymol. 217:286-295. In a preferred embodiment, the control DNA or RNA can be labeled for detection.

[1176] In still another embodiment, the mismatch cleavage reaction employs one or more proteins that recognize mismatched base pairs in double-stranded DNA (so called “DNA mismatch repair” enzymes) in defined systems for detecting and mapping point mutations in TWIK-8 cDNAs obtained from samples of cells. For example, the mutY enzyme of E. coli cleaves A at G/A mismatches and the thymidine DNA glycosylase from HeLa cells cleaves T at G/T mismatches (Hsu et al. (1994) Carcinogenesis 15:1657-1662). According to an exemplary embodiment, a probe based on a TWIK-8 sequence, e.g., a wild-type TWIK-8 sequence, is hybridized to a cDNA or other DNA product from a test cell(s). The duplex is treated with a DNA mismatch repair enzyme, and the cleavage products, if any, can be detected from electrophoresis protocols or the like. See, for example, U.S. Pat. No. 5,459,039.

[1177] In other embodiments, alterations in electrophoretic mobility will be used to identify mutations in TWIK-8 genes. For example, single strand conformation polymorphism (SSCP) may be used to detect differences in electrophoretic mobility between mutant and wild type nucleic acids (Orita et al. (1989) Proc Natl. Acad. Sci USA: 86:2766, see also Cotton (1993) Mutat. Res. 285:125-144; and Hayashi (1992) Genet. Anal. Tech. Appl. 9:73-79). Single-stranded DNA fragments of sample and control TWIK-8 nucleic acids will be denatured and allowed to renature. The secondary structure of single-stranded nucleic acids varies according to sequence, the resulting alteration in electrophoretic mobility enables the detection of even a single base change. The DNA fragments may be labeled or detected with labeled probes. The sensitivity of the assay may be enhanced by using RNA (rather than DNA), in which the secondary structure is more sensitive to a change in sequence. In a preferred embodiment, the subject method utilizes heteroduplex analysis to separate double stranded heteroduplex molecules on the basis of changes in electrophoretic mobility (Keen et al. (1991) Trends Genet 7:5).

[1178] In yet another embodiment the movement of mutant or wild-type fragments in polyacrylamide gels containing a gradient of denaturant is assayed using denaturing gradient gel electrophoresis (DGGE) (Myers et al. (1985) Nature 313:495). When DGGE is used as the method of analysis, DNA will be modified to insure that it does not completely denature, for example by adding a GC clamp of approximately 40 bp of high-melting GC-rich DNA by PCR. In a further embodiment, a temperature gradient is used in place of a denaturing gradient to identify differences in the mobility of control and sample DNA (Rosenbaum and Reissner (1987) Biophys Chem 265:12753).

[1179] Examples of other techniques for detecting point mutations include, but are not limited to, selective oligonucleotide hybridization, selective amplification, or selective primer extension. For example, oligonucleotide primers may be prepared in which the known mutation is placed centrally and then hybridized to target DNA under conditions which permit hybridization only if a perfect match is found (Saiki et al. (1986) Nature 324:163); Saiki et al. (1989) Proc. Natl Acad. Sci USA 86:6230). Such allele-specific oligonucleotides are hybridized to PCR amplified target DNA or a number of different mutations when the oligonucleotides are attached to the hybridizing membrane and hybridized with labeled target DNA.

[1180] Alternatively, allele specific amplification technology which depends on selective PCR amplification may be used in conjunction with the instant invention. Oligonucleotides used as primers for specific amplification may carry the mutation of interest in the center of the molecule (so that amplification depends on differential hybridization) (Gibbs et al. (1989) Nucleic Acids Res. 17:2437-2448) or at the extreme 3′ end of one primer where, under appropriate conditions, mismatch can prevent, or reduce polymerase extension (Prossner (1993) Tibtech 11:238). In addition it may be desirable to introduce a novel restriction site in the region of the mutation to create cleavage-based detection (Gasparini et al. (1992) Mol. Cell Probes 6:1). It is anticipated that in certain embodiments amplification may also be performed using Taq ligase for amplification (Barany (1991) Proc. Natl. Acad. Sci USA 88:189). In such cases, ligation will occur only if there is a perfect match at the 3′ end of the 5′ sequence making it possible to detect the presence of a known mutation at a specific site by looking for the presence or absence of amplification.

[1181] The methods described herein may be performed, for example, by utilizing pre-packaged diagnostic kits comprising at least one probe nucleic acid or antibody reagent described herein, which may be conveniently used, e.g., in clinical settings to diagnose patients exhibiting symptoms or family history of a disease or illness involving a TWIK-8 gene.

[1182] Furthermore, any cell type or tissue in which TWIK-8 is expressed may be utilized in the prognostic assays described herein.

[1183] 3. Monitoring of Effects During Clinical Trials

[1184] Monitoring the influence of agents (e.g., drugs) on the expression or activity of a TWIK-8 protein (e.g., the modulation of pain signaling mechanisms, neurotransmitter release and/or membrane excitability) can be applied not only in basic drug screening, but also in clinical trials. For example, the effectiveness of an agent determined by a screening assay as described herein to increase TWIK-8 gene expression, protein levels, or upregulate TWIK-8 activity, can be monitored in clinical trials of subjects exhibiting decreased TWIK-8 gene expression, protein levels, or downregulated TWIK-8 activity. Alternatively, the effectiveness of an agent determined by a screening assay to decrease TWIK-8 gene expression, protein levels, or downregulate TWIK-8 activity, can be monitored in clinical trials of subjects exhibiting increased TWIK-8 gene expression, protein levels, or upregulated TWIK-8 activity. In such clinical trials, the expression or activity of a TWIK-8 gene, and preferably, other genes that have been implicated in, for example, a TWIK-8-associated disorder can be used as a “read out” or markers of the phenotype of a particular cell.

[1185] For example, and not by way of limitation, genes, including TWIK-8, that are modulated in cells by treatment with an agent (e.g., compound, drug or small molecule) which modulates TWIK-8 activity (e.g., identified in a screening assay as described herein) can be identified. Thus, to study the effect of agents on TWIK-8-associated disorders (e.g., disorders characterized by deregulated pain signaling mechanisms, neurotransmitter release and/or membrane excitability), for example, in a clinical trial, cells can be isolated and RNA prepared and analyzed for the levels of expression of TWIK-8 and other genes implicated in the TWIK-8-associated disorder, respectively. The levels of gene expression (e.g., a gene expression pattern) can be quantified by northern blot analysis or RT-PCR, as described herein, or alternatively by measuring the amount of protein produced, by one of the methods as described herein, or by measuring the levels of activity of TWIK-8 or other genes. In this way, the gene expression pattern can serve as a marker, indicative of the physiological response of the cells to the agent. Accordingly, this response state may be determined before, and at various points during treatment of the individual with the agent.

[1186] In a preferred embodiment, the present invention provides a method for monitoring the effectiveness of treatment of a subject with an agent (e.g., an agonist, antagonist, peptidomimetic, protein, peptide, nucleic acid, small molecule, or other drug candidate identified by the screening assays described herein) including the steps of (i) obtaining a pre-administration sample from a subject prior to administration of the agent; (ii) detecting the level of expression of a TWIK-8 protein, mRNA, or genomic DNA in the preadministration sample; (iii) obtaining one or more post-administration samples from the subject; (iv) detecting the level of expression or activity of the TWIK-8 protein, mRNA, or genomic DNA in the post-administration samples; (v) comparing the level of expression or activity of the TWIK-8 protein, mRNA, or genomic DNA in the pre-administration sample with the TWIK-8 protein, mRNA, or genomic DNA in the post administration sample or samples; and (vi) altering the administration of the agent to the subject accordingly. For example, increased administration of the agent may be desirable to increase the expression or activity of TWIK-8 to higher levels than detected, i.e., to increase the effectiveness of the agent. Alternatively, decreased administration of the agent may be desirable to decrease expression or activity of TWIK-8 to lower levels than detected, i.e. to decrease the effectiveness of the agent. According to such an embodiment, TWIK-8 expression or activity may be used as an indicator of the effectiveness of an agent, even in the absence of an observable phenotypic response.

[1187] D. Methods of Treatment:

[1188] The present invention provides for both prophylactic and therapeutic methods of treating a subject at risk of (or susceptible to) a disorder or having a disorder associated with aberrant or unwanted TWIK-8 expression or activity, e.g. a potassium channel associated disorder such as a CNS disorder, a cardiovascular disorder, a pain disorder, or a cellular proliferation, growth, differentiation, or migration disorder. “Treatment”, as used herein, is defined as the application or administration of a therapeutic agent to a patient, or application or administration of a therapeutic agent to an isolated tissue or cell line from a patient, who has a disease or disorder, a symptom of disease or disorder or a predisposition toward a disease or disorder, with the purpose to cure, heal, alleviate, relieve, alter, remedy, ameliorate, improve or affect the disease or disorder, the symptoms of disease or disorder or the predisposition toward a disease or disorder. A therapeutic agent includes, but is not limited to, small molecules, peptides, antibodies, ribozymes and antisense oligonucleotides. With regards to both prophylactic and therapeutic methods of treatment, such treatments may be specifically tailored or modified, based on knowledge obtained from the field of pharmacogenomics. “Pharmacogenomics”, as used herein, refers to the application of genomics technologies such as gene sequencing, statistical genetics, and gene expression analysis to drugs in clinical development and on the market. More specifically, the term refers the study of how a patient's genes determine his or her response to a drug (e.g., a patient's “drug response phenotype”, or “drug response genotype”). Thus, another aspect of the invention provides methods for tailoring an individual's prophylactic or therapeutic treatment with either the TWIK-8 molecules of the present invention or TWIK-8 modulators according to that individual's drug response genotype. Pharmacogenomics allows a clinician or physician to target prophylactic or therapeutic treatments to patients who will most benefit from the treatment and to avoid treatment of patients who will experience toxic drug-related side effects.

[1189] 1. Prophylactic Methods

[1190] In one aspect, the invention provides a method for preventing in a subject, a disease or condition associated with an aberrant or unwanted TWIK-8 expression or activity, by administering to the subject a TWIK-8 or an agent which modulates TWIK-8 expression or at least one TWIK-8 activity. Subjects at risk for a disease which is caused or contributed to by aberrant or unwanted TWIK-8 expression or activity can be identified by, for example, any or a combination of diagnostic or prognostic assays as described herein. Administration of a prophylactic agent can occur prior to the manifestation of symptoms characteristic of the TWIK-8 aberrancy, such that a disease or disorder is prevented or, alternatively, delayed in its progression. Depending on the type of TWIK-8 aberrancy, for example, a TWIK-8, TWIK-8 agonist or TWIK-8 antagonist agent can be used for treating the subject. The appropriate agent can be determined based on screening assays described herein.

[1191] 2. Therapeutic Methods

[1192] Another aspect of the invention pertains to methods of modulating TWIK-8 expression or activity for therapeutic purposes. Accordingly, in an exemplary embodiment, the modulatory method of the invention involves contacting a cell with a TWIK-8 or agent that modulates one or more of the activities of TWIK-8 protein activity associated with the cell. An agent that modulates TWIK-8 protein activity can be an agent as described herein, such as a nucleic acid or a protein, a naturally-occurring target molecule of a TWIK-8 protein (e.g., a TWIK-8 substrate), a TWIK-8 antibody, a TWIK-8 agonist or antagonist, a peptidomimetic of a TWIK-8 agonist or antagonist, or other small molecule. In one embodiment, the agent stimulates one or more TWIK-8 activities. Examples of such stimulatory agents include active TWIK-8 protein and a nucleic acid molecule encoding TWIK-8 that has been introduced into the cell. In another embodiment, the agent inhibits one or more TWIK-8 activities. Examples of such inhibitory agents include antisense TWIK-8 nucleic acid molecules, anti-TWIK-8 antibodies, and TWIK-8 inhibitors. These modulatory methods can be performed in vitro (e.g., by culturing the cell with the agent) or, alternatively, in vivo (e.g., by administering the agent to a subject). As such, the present invention provides methods of treating an individual afflicted with a disease or disorder characterized by aberrant or unwanted expression or activity of a TWIK-8 protein or nucleic acid molecule. In one embodiment, the method involves administering an agent (e.g., an agent identified by a screening assay described herein), or combination of agents that modulates (e.g., upregulates or downregulates) TWIK-8 expression or activity. In another embodiment, the method involves administering a TWIK-8 protein or nucleic acid molecule as therapy to compensate for reduced, aberrant, or unwanted TWIK-8 expression or activity.

[1193] Stimulation of TWIK-8 activity is desirable in situations in which TWIK-8 is abnormally downregulated and/or in which increased TWIK-8 activity is likely to have a beneficial effect. Likewise, inhibition of TWIK-8 activity is desirable in situations in which TWIK-8 is abnormally upregulated and/or in which decreased TWIK-8 activity is likely to have a beneficial effect.

[1194] 3. Pharmacogenomics

[1195] The TWIK-8 molecules of the present invention, as well as agents, or modulators which have a stimulatory or inhibitory effect on TWIK-8 activity (e.g., TWIK-8 gene expression) as identified by a screening assay described herein can be administered to individuals to treat (prophylactically or therapeutically) TWIK-8-associated disorders (e.g., pain disorders, cardiovascular disorders, proliferative disorders) associated with aberrant or unwanted TWIK-8 activity. In conjunction with such treatment, pharmacogenomics (i.e., the study of the relationship between an individual's genotype and that individual's response to a foreign compound or drug) may be considered. Differences in metabolism of therapeutics can lead to severe toxicity or therapeutic failure by altering the relation between dose and blood concentration of the pharmacologically active drug. Thus, a physician or clinician may consider applying knowledge obtained in relevant pharmacogenomics studies in determining whether to administer a TWIK-8 molecule or TWIK-8 modulator as well as tailoring the dosage and/or therapeutic regimen of treatment with a TWIK-8 molecule or TWIK-8 modulator.

[1196] Pharmacogenomics deals with clinically significant hereditary variations in the response to drugs due to altered drug disposition and abnormal action in affected persons. See, for example, Eichelbaum, M. et al. (1996) Clin. Exp. Pharmacol. Physiol. 23(10-11): 983-985 and Linder, M. W. et al. (1997) Clin. Chem. 43(2):254-266. In general, two types of pharmacogenetic conditions can be differentiated. Genetic conditions transmitted as a single factor altering the way drugs act on the body (altered drug action) or genetic conditions transmitted as single factors altering the way the body acts on drugs (altered drug metabolism). These pharmacogenetic conditions can occur either as rare genetic defects or as naturally-occurring polymorphisms. For example, glucose-6-phosphate dehydrogenase deficiency (G6PD) is a common inherited enzymopathy in which the main clinical complication is haemolysis after ingestion of oxidant drugs (anti-malarials, sulfonamides, analgesics, nitrofurans) and consumption of fava beans.

[1197] One pharmacogenomics approach to identifying genes that predict drug response, known as “a genome-wide association”, relies primarily on a high-resolution map of the human genome consisting of already known gene-related markers (e.g., a “bi-allelic” gene marker map which consists of 60,000-100,000 polymorphic or variable sites on the human genome, each of which has two variants.) Such a high-resolution genetic map can be compared to a map of the genome of each of a statistically significant number of patients taking part in a Phase II/III drug trial to identify markers associated with a particular observed drug response or side effect. Alternatively, such a high resolution map can be generated from a combination of some ten-million known single nucleotide polymorphisms (SNPs) in the human genome. As used herein, a “SNP” is a common alteration that occurs in a single nucleotide base in a stretch of DNA. For example, a SNP may occur once per every 1000 bases of DNA. A SNP may be involved in a disease process, however, the vast majority may not be disease-associated. Given a genetic map based on the occurrence of such SNPs, individuals can be grouped into genetic categories depending on a particular pattern of SNPs in their individual genome. In such a manner, treatment regimens can be tailored to groups of genetically similar individuals, taking into account traits that may be common among such genetically similar individuals.

[1198] Alternatively, a method termed the “candidate gene approach”, can be utilized to identify genes that predict drug response. According to this method, if a gene that encodes a drugs target is known (e.g., a TWIK-8 protein of the present invention), all common variants of that gene can be fairly easily identified in the population and it can be determined if having one version of the gene versus another is associated with a particular drug response.

[1199] As an illustrative embodiment, the activity of drug metabolizing enzymes is a major determinant of both the intensity and duration of drug action. The discovery of genetic polymorphisms of drug metabolizing enzymes (e.g., N-acetyltransferase 2 (NAT 2) and cytochrome P450 enzymes CYP2D6 and CYP2C19) has provided an explanation as to why some patients do not obtain the expected drug effects or show exaggerated drug response and serious toxicity after taking the standard and safe dose of a drug. These polymorphisms are expressed in two phenotypes in the population, the extensive metabolizer (EM) and poor metabolizer (PM). The prevalence of PM is different among different populations. For example, the gene coding for CYP2D6 is highly polymorphic and several mutations have been identified in PM, which all lead to the absence of functional CYP2D6. Poor metabolizers of CYP2D6 and CYP2C19 quite frequently experience exaggerated drug response and side effects when they receive standard doses. If a metabolite is the active therapeutic moiety, PM show no therapeutic response, as demonstrated for the analgesic effect of codeine mediated by its CYP2D6-formed metabolite morphine. The other extreme are the so-called ultra-rapid metabolizers who do not respond to standard doses. Recently, the molecular basis of ultra-rapid metabolism has been identified to be due to CYP2D6 gene amplification.

[1200] Alternatively, a method termed the “gene expression profiling”, can be utilized to identify genes that predict drug response. For example, the gene expression of an animal dosed with a drug (e.g., a TWIK-8 molecule or TWIK-8 modulator of the present invention) can give an indication whether gene pathways related to toxicity have been turned on.

[1201] Information generated from more than one of the above pharmacogenomics approaches can be used to determine appropriate dosage and treatment regimens for prophylactic or therapeutic treatment an individual. This knowledge, when applied to dosing or drug selection, can avoid adverse reactions or therapeutic failure and thus enhance therapeutic or prophylactic efficiency when treating a subject with a TWIK-8 molecule or TWIK-8 modulator, such as a modulator identified by one of the exemplary screening assays described herein.

[1202] VI. Electronic Apparatus Readable Media and Arrays

[1203] Electronic apparatus readable media comprising TWIK-8 sequence information is also provided. As used herein, “TWIK-8 sequence information” refers to any nucleotide and/or amino acid sequence information particular to the TWIK-8 molecules of the present invention, including but not limited to full-length nucleotide and/or amino acid sequences, partial nucleotide and/or amino acid sequences, polymorphic sequences including single nucleotide polymorphisms (SNPs), epitope sequences, and the like. Moreover, information “related to” said TWIK-8 sequence information includes detection of the presence or absence of a sequence (e.g., detection of expression of a sequence, fragment, polymorphism, etc.), determination of the level of a sequence (e.g., detection of a level of expression, for example, a quantitative detection), detection of a reactivity to a sequence (e.g., detection of protein expression and/or levels, for example, using a sequence-specific antibody), and the like. As used herein, “electronic apparatus readable media” refers to any suitable medium for storing, holding or containing data or information that can be read and accessed directly by an electronic apparatus. Such media can include, but are not limited to: magnetic storage media, such as floppy discs, hard disc storage medium, and magnetic tape; optical storage media such as compact disc; electronic storage media such as RAM, ROM, EPROM, EEPROM and the like; general hard disks and hybrids of these categories such as magnetic/optical storage media. The medium is adapted or configured for having recorded thereon TWIK-8 sequence information of the present invention.

[1204] As used herein, the term “electronic apparatus” is intended to include any suitable computing or processing apparatus or other device configured or adapted for storing data or information. Examples of electronic apparatus suitable for use with the present invention include stand-alone computing apparatus; networks, including a local area network (LAN), a wide area network (WAN) Internet, Intranet, and Extranet; electronic appliances such as a personal digital assistants (PDAs), cellular phone, pager and the like; and local and distributed processing systems.

[1205] As used herein, “recorded” refers to a process for storing or encoding information on the electronic apparatus readable medium. Those skilled in the art can readily adopt any of the presently known methods for recording information on known media to generate manufactures comprising the TWIK-8 sequence information.

[1206] A variety of software programs and formats can be used to store the sequence information on the electronic apparatus readable medium. For example, the sequence information can be represented in a word processing text file, formatted in commercially-available software such as WordPerfect and Microsoft Word, or represented in the form of an ASCII file, stored in a database application, such as DB2, Sybase, Oracle, or the like, as well as in other forms. Any number of data processor structuring formats (e.g., text file or database) may be employed in order to obtain or create a medium having recorded thereon the TWIK-8 sequence information.

[1207] By providing TWIK-8 sequence information in readable form, one can routinely access the sequence information for a variety of purposes. For example, one skilled in the art can use the sequence information in readable form to compare a target sequence or target structural motif with the sequence information stored within the data storage means. Search means are used to identify fragments or regions of the sequences of the invention which match a particular target sequence or target motif.

[1208] The present invention therefore provides a medium for holding instructions for performing a method for determining whether a subject has a TWIK-8-associated disease or disorder or a pre-disposition to a TWIK-8-associated disease or disorder, wherein the method comprises the steps of determining TWIK-8 sequence information associated with the subject and based on the TWIK-8 sequence information, determining whether the subject has a TWIK-8-associated disease or disorder or a pre-disposition to a TWIK-8-associated disease or disorder and/or recommending a particular treatment for the disease, disorder or pre-disease condition.

[1209] The present invention further provides in an electronic system and/or in a network, a method for determining whether a subject has a TWIK-8-associated disease or disorder or a pre-disposition to a disease associated with a TWIK-8 wherein the method comprises the steps of determining TWIK-8 sequence information associated with the subject, and based on the TWIK-8 sequence information, determining whether the subject has a TWIK-8-associated disease or disorder or a pre-disposition to a TWIK-8-associated disease or disorder, and/or recommending a particular treatment for the disease, disorder or pre-disease condition. The method may further comprise the step of receiving phenotypic information associated with the subject and/or acquiring from a network phenotypic information associated with the subject.

[1210] The present invention also provides in a network, a method for determining whether a subject has a TWIK-8-associated disease or disorder or a pre-disposition to a TWIK-8 associated disease or disorder associated with TWIK-8, said method comprising the steps of receiving TWIK-8 sequence information from the subject and/or information related thereto, receiving phenotypic information associated with the subject, acquiring information from the network corresponding to TWIK-8 and/or a TWIK-8-associated disease or disorder, and based on one or more of the phenotypic information, the TWIK-8 information (e.g., sequence information and/or information related thereto), and the acquired information, determining whether the subject has a TWIK-8-associated disease or disorder or a pre-disposition to a TWIK-8-associated disease or disorder (e.g., a pain disorder, a cardiovascular disorder, a CNS disorder, or a cellular proliferation, growth, differentiation, or migration disorder). The method may further comprise the step of recommending a particular treatment for the disease, disorder or pre-disease condition.

[1211] The present invention also provides a business method for determining whether a subject has a TWIK-8-associated disease or disorder or a pre-disposition to a TWIK-8-associated disease or disorder, said method comprising the steps of receiving information related to TWIK-8 (e.g., sequence information and/or information related thereto), receiving phenotypic information associated with the subject, acquiring information from the network related to TWIK-8 and/or related to a TWIK-8-associated disease or disorder, and based on one or more of the phenotypic information, the TWIK-8 information, and the acquired information, determining whether the subject has a TWIK-8-associated disease or disorder or a pre-disposition to a TWIK-8-associated disease or disorder. The method may further comprise the step of recommending a particular treatment for the disease, disorder or pre-disease condition.

[1212] The invention also includes an array comprising a TWIK-8 sequence of the present invention. The array can be used to assay expression of one or more genes in the array. In one embodiment, the array can be used to assay gene expression in a tissue to ascertain tissue specificity of genes in the array. In this manner, up to about 7600 genes can be simultaneously assayed for expression, one of which can be TWIK-8. This allows a profile to be developed showing a battery of genes specifically expressed in one or more tissues.

[1213] In addition to such qualitative determination, the invention allows the quantitation of gene expression. Thus, not only tissue specificity, but also the level of expression of a battery of genes in the tissue is ascertainable. Thus, genes can be grouped on the basis of their tissue expression per se and level of expression in that tissue. This is useful, for example, in ascertaining the relationship of gene expression between or among tissues. Thus, one tissue can be perturbed and the effect on gene expression in a second tissue can be determined. In this context, the effect of one cell type on another cell type in response to a biological stimulus can be determined. Such a determination is useful, for example, to know the effect of cell-cell interaction at the level of gene expression. If an agent is administered therapeutically to treat one cell type but has an undesirable effect on another cell type, the invention provides an assay to determine the molecular basis of the undesirable effect and thus provides the opportunity to co-administer a counteracting agent or otherwise treat the undesired effect. Similarly, even within a single cell type, undesirable biological effects can be determined at the molecular level. Thus, the effects of an agent on expression of other than the target gene can be ascertained and counteracted.

[1214] In another embodiment, the array can be used to monitor the time course of expression of one or more genes in the array. This can occur in various biological contexts, as disclosed herein, for example development of a TWIK-8-associated disease or disorder, progression of TWIK-8-associated disease or disorder, and processes, such a cellular transformation associated with the TWIK-8-associated disease or disorder.

[1215] The array is also useful for ascertaining the effect of the expression of a gene on the expression of other genes in the same cell or in different cells (e.g., ascertaining the effect of TWIK-8 expression on the expression of other genes). This provides, for example, for a selection of alternate molecular targets for therapeutic intervention if the ultimate or downstream target cannot be regulated.

[1216] The array is also useful for ascertaining differential expression patterns of one or more genes in normal and abnormal cells. This provides a battery of genes (e.g., including TWIK-8) that could serve as a molecular target for diagnosis or therapeutic intervention.

[1217] This invention is further illustrated by the following examples which should not be construed as limiting. The contents of all references, patents and published patent applications cited throughout this application, as well as the Figures and the Sequence Listing, are incorporated herein by reference.

### EXAMPLES

### Example 1

### Identification and Characterization of Human TWIK-8 cDNA

[1218] In this example, the identification and characterization of the gene encoding human TWIK-8 (clone Fbh12303) is described.

[1219] Isolation of the TWIK-8 cDNA

[1220] The invention is based, at least in part, on the discovery of a human gene encoding a novel protein, referred to herein as TWIK-8. The entire sequence of the human clone Fbh12303 was determined and found to contain an open reading frame termed human “TWIK-8.”

[1221] The nucleotide sequence encoding the human TWIK-8 protein is shown in FIG. 19 and is set forth as SEQ ID NO:28. The protein encoded by this nucleic acid comprises about 419 amino acids and has the amino acid sequence shown in FIG. 19 and set forth as SEQ ID NO:29. The coding region (open reading frame) of SEQ ID NO:28 is set forth as SEQ ID NO:30. Clone Fbh12303, comprising the coding region of human TWIK-8, was deposited with the American Type Culture Collection (ATCC®), 10801 University Boulevard, Manassas, Va. 20110-2209, on ______, and assigned Accession No. ______.

[1222] Analysis of the Human TWIK-8 Molecule

[1223] The amino acid sequence of human TWIK-8 was analyzed using the program PSORT (http://www.psort.nibb.ac.jp) to predict the localization of the proteins within the cell. This program assesses the presence of different targeting and localization amino acid sequences within the query sequence. The results of the analysis show that human TWIK-8 (SEQ ID NO:29) may be localized to the endoplasmic reticulum or to the mitochondrion.

[1224] An analysis of the amino acid sequence of human TWIK-8 using the Signal P program (Henrik, et al. (1997) Protein Engineering 10:1-6), identified the presence of a signal peptide from amino acids 1-46 (FIG. 20).

[1225] A search was performed against the Memsat database (FIG. 21) resulting in the identification of six transmembrane domains in the amino acid sequence of the native human TWIK-8 (SEQ ID NO:29) at about residues 32-50, 116-137, 144-165, 195-219, 226-242, and 260-283. This search further identified five transmembrane domains in the amino acid sequence of the predicted mature form of this protein, at about residues 70-91, 98-119, 149-173, 180-196, and 214-237. The results of this search are set forth in FIG. 21.

[1226] A search was performed against the HMM database (FIG. 22), resulting in the identification of a “seven-transmembrane receptor domain” from about residues 25-244, and a “cyclic nucleotide-gated channel domain” from about residues 27-204 in the amino acid sequence of human TWIK-8 (SEQ ID NO:29).

[1227] A search was also performed against the ProDom database (FIGS. 23A-H), resulting in the identification of “TRAAK potassium channel domains” from about residues 50-104 (score=175), 175-199 (score=115), and 288-382 (score=135); a “potassium channel protein domain” from about residues 99-153 (score=101); a “voltage-gated potassium channel domain” from about residues 102-168 (score=115); an “outward-rectifier TOK1 potassium channel domain” from about residues 215-270 (score=70); and a “potassium channel subunit domain” from about residues 216-287 (score=156) in the amino acid sequence of human TWIK-8 (SEQ ID NO:29).

[1228] A BLASTX 2.0 search against the NRP/protot database, using a score of 100, a wordlength of 3, and a Blosum 62 matrix (Altschul et al. (1990) J. Mol. Biol. 215:403), of the translated nucleotide sequence of human TWIK-8 revealed that human TWIK-8 has limited sequence homology to Mus musculus TRAAK K+ channel subunit mRNA (Accession Number AF056492), to Homo sapiens TREK-1 potassium channel (KCNK2) mRNA (Accession Number AF129399), to Mus musculus TREK-1 K+ channel subunit mRNA (Accession Number U73488), and to Homo sapiens two-pore potassium channel TPKC1 mRNA (Accession number AF004711).

[1229] Tissue Distribution of TWIK-8 mRNA by PCR and In Situ Hybridization

[1230] The tissue distribution of TWIK-8 mRNA is determined by Polymerase Chain Reaction (PCR) on cDNA libraries of normal human tissues using oligonucleotide primers based on the human TWIK-8 sequence.

[1231] The tissue distribution of TWIK-8 mRNA is also determined using in situ hybridization. For in situ analysis, various tissues, e.g. tissues obtained from brain, are first frozen on dry ice. Ten-micrometer-thick sections of the tissues are postfixed with 4% formaldehyde in DEPC treated 1×phosphate-buffered saline at room temperature for 10 minutes before being rinsed twice in DEPC 1×phosphate-buffered saline and once in 0.1 M triethanolamine-HCl (pH 8.0). Following incubation in 0.25% acetic anhydride-0.1 M triethanolamine-HCl for 10 minutes, sections are rinsed in DEPC 2×SSC (1×SSC is 0.15M NaCl plus 0.015M sodium citrate). Tissue is then dehydrated through a series of ethanol washes, incubated in 100% chloroform for 5 minutes, and then rinsed in 100% ethanol for 1 minute and 95% ethanol for 1 minute and allowed to air dry.

[1232] Hybridizations are performed with ³⁵S-radiolabeled (5×10⁷ cpm/ml) cRNA probes. Probes are incubated in the presence of a solution containing 600 mM NaCl, 10 mM Tris (pH 7.5), 1 mM EDTA, 0.01% sheared salmon sperm DNA, 0.01% yeast tRNA, 0.05% yeast total RNA type X1, 1×Denhardt's solution, 50% formamide, 10% dextran sulfate, 100 mM dithiothreitol, 0.1% sodium dodecyl sulfate (SDS), and 0.1% sodium thiosulfate for 18 hours at 55° C.

[1233] After hybridization, slides are washed with 2×SSC. Sections are then sequentially incubated at 37° C. in TNE (a solution containing 10 mM Tris-HCl (pH 7.6), 500 mM NaCl, and 1 mM EDTA), for 10 minutes, in TNE with 10 μg of RNase A per ml for 30 minutes, and finally in TNE for 10 minutes. Slides are then rinsed with 2×SSC at room temperature, washed with 2×SSC at 50° C. for 1 hour, washed with 0.2×SSC at 55° C. for 1 hour, and 0.2×SSC at 60° C. for 1 hour. Sections are then dehydrated rapidly through serial ethanol-0.3 M sodium acetate concentrations before being air dried and exposed to Kodak Biomax MR scientific imaging film for 24 hours and subsequently dipped in NB-2 photoemulsion and exposed at 4° C. for 7 days before being developed and counter stained.

[1234] Tissue Distribution of Human TWIK-8 mRNA Using Tagman™ Analysis

[1235] This example describes the tissue distribution of human TWIK-8 mRNA in a variety of cells and tissues, as determined using the TaqMan™ procedure. The Taqman™ procedure is a quantitative, reverse transcription PCR-based approach for detecting mRNA. The RT-PCR reaction exploits the 5′ nuclease activity of AmpliTaq Gold™ DNA Polymerase to cleave a TaqMan™ probe during PCR. Briefly, cDNA was generated from the samples of interest, e.g., various human tissue samples, and used as the starting material for PCR amplification. In addition to the 5′ and 3′ gene-specific primers, a gene-specific oligonucleotide probe (complementary to the region being amplified) was included in the reaction (i.e., the Taqman™ probe). The TaqMan™ probe includes the oligonucleotide with a fluorescent reporter dye covalently linked to the 5′ end of the probe (such as FAM (6-carboxyfluorescein), TET (6-carboxy-4,7,2′,7′-tetrachlorofluorescein), JOE (6-carboxy-4,5-dichloro-2,7-dimethoxyfluorescein), or VIC) and a quencher dye (TAMRA (6-carboxy-N,N,N′,N′-tetramethylrhodamine) at the 3′ end of the probe.

[1236] During the PCR reaction, cleavage of the probe separates the reporter dye and the quencher dye, resulting in increased fluorescence of the reporter. Accumulation of PCR products is detected directly by monitoring the increase in fluorescence of the reporter dye. When the probe is intact, the proximity of the reporter dye to the quencher dye results in suppression of the reporter fluorescence. During PCR, if the target of interest is present, the probe specifically anneals between the forward and reverse primer sites. The 5′-3′ nucleolytic activity of the AmpliTaq™ Gold DNA Polymerase cleaves the probe between the reporter and the quencher only if the probe hybridizes to the target. The probe fragments are then displaced from the target, and polymerization of the strand continues. The 3′ end of the probe is blocked to prevent extension of the probe during PCR. This process occurs in every cycle and does not interfere with the exponential accumulation of product. RNA was prepared using the trizol method and treated with DNase to remove contaminating genomic DNA. cDNA was synthesized using standard techniques. Mock cDNA synthesis in the absence of reverse transcriptase resulted in samples with no detectable PCR amplification of the control gene confirms efficient removal of genomic DNA contamination.

[1237] Highest expression of TWIK-8 mRNA was detected in cortex, followed by dorsal root ganglia, and hypothalamus. Weak expression was also detected in erythroid tissue, followed by HUVEC, spinal cord, hemangioma, kidney, normal ovary and ovary tumor, megakaryocytes, normal prostate and prostate tumor. Weak expression was also detected in breast tumor although no expression was detected in normal breast tissue.

### Example 2

### Expression of Recombinant TWIK-8 Protein in Bacterial Cells

[1238] In this example, TWIK-8 is expressed as a recombinant glutathione-S-transferase (GST) fusion polypeptide in E. coli and the fusion polypeptide is isolated and characterized. Specifically, TWIK-8 is fused to GST and this fusion polypeptide is expressed in E. coli, e.g., strain PEB199. Expression of the GST-TWIK-8 fusion protein in PEB199 is induced with IPTG. The recombinant fusion polypeptide is purified from crude bacterial lysates of the induced PEB199 strain by affinity chromatography on glutathione beads. Using polyacrylamide gel electrophoretic analysis of the polypeptide purified from the bacterial lysates, the molecular weight of the resultant fusion polypeptide is determined.

### Example 3

### Expression of Recombinant TWIK-8 Protein in COS Cells

[1239] To express the TWIK-8 gene in COS cells, the pcDNA/Amp vector by Invitrogen Corporation (San Diego, Calif.) is used. This vector contains an SV40 origin of replication, an ampicillin resistance gene, an E. coli replication origin, a CMV promoter followed by a polylinker region, and an SV40 intron and polyadenylation site. A DNA fragment encoding the entire TWIK-8 protein and an HA tag (Wilson et al. (1984) Cell 37:767) or a FLAG tag fused in-frame to its 3′ end of the fragment is cloned into the polylinker region of the vector, thereby placing the expression of the recombinant protein under the control of the CMV promoter.

[1240] To construct the plasmid, the TWIK-8 DNA sequence is amplified by PCR using two primers. The 5′ primer contains the restriction site of interest followed by approximately twenty nucleotides of the TWIK-8 coding sequence starting from the initiation codon; the 3′ end sequence contains complementary sequences to the other restriction site of interest, a translation stop codon, the HA tag or FLAG tag and the last 20 nucleotides of the TWIK-8 coding sequence. The PCR amplified fragment and the pCDNA/Amp vector are digested with the appropriate restriction enzymes and the vector is dephosphorylated using the CIAP enzyme (New England Biolabs, Beverly, Mass.). Preferably the two restriction sites chosen are different so that the TWIK-8 gene is inserted in the correct orientation. The ligation mixture is transformed into E. coli cells (strains HB101, DH5 α, SURE, available from Stratagene Cloning Systems, La Jolla, Calif., can be used), the transformed culture is plated on ampicillin media plates, and resistant colonies are selected. Plasmid DNA is isolated from transformants and examined by restriction analysis for the presence of the correct fragment.

[1241] COS cells are subsequently transfected with the TWIK-8-pcDNA/Amp plasmid DNA using the calcium phosphate or calcium chloride co-precipitation methods, DEAE-dextran-mediated transfection, lipofection, or electroporation. Other suitable methods for transfecting host cells can be found in Sambrook, J., Fritsh, E. F., and Maniatis, T. Molecular Cloning: A Laboratory Manual. 2nd, ed., Cold Spring Harbor Laboratory, Cold Spring Harbor Laboratory Press, Cold Spring Harbor, N.Y., 1989. The expression of the TWIK-8 polypeptide is detected by radiolabeling (³⁵S-methionine or ³⁵S-cysteine available from NEN, Boston, Mass., can be used) and immunoprecipitation (Harlow, E. and Lane, D. Antibodies: A Laboratory Manual, Cold Spring Harbor Laboratory Press, Cold Spring Harbor, N.Y., 1988) using an HA specific monoclonal antibody. Briefly, the cells are labeled for 8 hours with ³⁵S-methionine (or ³⁵S-cysteine). The culture media are then collected and the cells are lysed using detergents (RIPA buffer, 150 mM NaCl, 1% NP-40, 0.1% SDS, 0.5% DOC, 50 mM Tris, pH 7.5). Both the cell lysate and the culture media are precipitated with an HA specific monoclonal antibody. Precipitated polypeptides are then analyzed by SDS-PAGE.

[1242] Alternatively, DNA containing the TWIK-8 coding sequence is cloned directly into the polylinker of the pCDNA/Amp vector using the appropriate restriction sites. The resulting plasmid is transfected into COS cells in the manner described above, and the expression of the TWIK-8 polypeptide is detected by radiolabeling and immunoprecipitation using a TWIK-8 specific monoclonal antibody.

### V. 47611, A NOVEL HUMAN ION CHANNEL AND USES THEREOF

### Background of the Invention

[1243] The ion channel family of proteins is a large family of membrane-bound proteins responsible for a wide range of important transport and signaling functions in cells. The ion channel family includes at least three subfamilies: calcium ion channels (i.e., Ca channels), potassium channels (i e., K channels) and sodium channels (Na channels). Members of the ion channel family are characterized by the presence of six (6) transmembrane helices in which the last two helices flank a loop which determines ion selectivity. In some subfamilies (e.g., Na channels) the domain is repeated four times, whereas in others (e.g., K channels) the protein forms as a tetramer in the membrane.

[1244] Calcium channel proteins are involved in the control of neurotransmitter release from neurons (Williams et al. (1992) Science 257:389-395), and play an important role in the regulation of a variety of cellular functions, including membrane excitability, muscle contraction and synaptic transmission (Mori et al. (1991) Nature 350:398-402). The calcium channel proteins are composed of four (4) tightly-coupled subunits (α1, α2, β and γ), the α1 subunit from each creating the pore for the import of extracellular calcium ions. The α1 subunit shares sequence characteristics with all voltage-dependent cation channels, and exploits the same 6-helix bundle structural motif. In both sodium and calcium channels, this motif is repeated 4 times within the sequence to give a 24-helix bundle. There are several tissue-specific pharmacologically and electrophysiologically distinct isoforms of calcium channels, coded for by separate genes in a multi-gene family. In skeletal muscle, each tightly-bound assembly of α, β and γ subunits associates with 4 others to form a pentameric macromolecule (Koch et al. (1990) J. Biol. Chem. 265:17786-17791). Examples of calcium channels include, but are not limited to, the low-voltage-gated channels and the high-voltage-gated channels. Calcium channels are described in, for example, Davila et al. (1999) Ann. N.Y. Acad. Sci. 868:102-17 and McEnery et al. (1998) J. Bioenergetics and Biomembranes 30(4):409-418, the contents of which are incorporated herein by reference.

[1245] Sodium channels are transmembrane (TM) voltage-dependent proteins responsible for the depolarizing phase of the action potential in most electrically excitable cells (George et al. (1992) Proc. Natl. Acad Sci. USA 89:4893-4897). They may exist in 3 states (Noda et al. (1984) Nature 312:121-127): the resting state, where the channel is closed; the activated state, where the channel is open; and the inactivated state, where the channel is closed. Several different structurally and functionally distinct isoforms are found in mammals, coded for by a multigene family (Rogart et al. (1989) Proc. Natl. Acad. Sci USA 86:8170-8174), these being responsible for the different types of sodium ion currents found in excitable tissues. The structure of sodium channels is based on 4 internal repeats of a 6-helix bundle (Noda et al. (1986) Nature 320:188-192) (in which 5 of the membrane-spanning segments are hydrophobic and the other is positively charged), forming a 24-helical bundle. The charged segments are believed to be localized within clusters formed by their 5 hydrophobic neighbors. It is postulated that the charged domain may be the voltage sensor region, possibly moving outward on depolarization, causing a conformational change. This model, proposed by (Noda et al., supra), contrasts with that of Sato and Matsumoto (1992) Biochem. Biophys. Res. Commun.. 186:1158-1167), in which the TM segments are juxtaposed octagonally. The basic structural motif (the 6-helix bundle) is also found in potassium and calcium channels.

[1246] Potassium channels are the most diverse group of the ion channel family (possibly as a result of gene duplication and alternative splicing of the genes (Perney and Kaczmarek (1991) Curr. Opin. Cell. Biol. 3:663-670 and Luneau et al. (1991) FEBS Lett. 288:163-167). They are important in shaping the action potential, and in neuronal excitability and plasticity (Tempel et al. (1988) Nature 332:837-839). The potassium channel family is composed of several functionally distinct isoforms, which can be broadly separated into 2 groups (Stuehmer et al. (1989) EMBO J. 8:3225-3244). The first is the practically non-inactivating “delayed” group, the second the rapidly inactivating “transient” group. These are all highly similar proteins, with possibly only small amino acid changes causing the diversity of the voltage-dependent gating mechanism, channel conductance and toxin binding properties. Members of the potassium channel family vary in several ways. Some open in response to depolarization of the plasma membrane; others open in response to hyperpolarization or an increase in intracellular calcium concentration; some can be regulated by binding of a transmitter, together with intracellular kinases; and others are regulated by GTP-binding proteins or other second messengers (Schwarz et al. (1988) Nature 331:137-142 (1988). They are also involved in T-cell activation, and may have a role in target cell lysis by cytotoxic T-lymphocytes (Attali et al. (1992) J. Biol. Chem. 267:8650-8657 (1992). Potassium channels are transmembrane (TM) proteins that contain 6 membrane-spanning α-helical segments, 5 of which are hydrophobic, the other being positively charged. The charged segment is believed to be localized within a cluster formed by the hydrophobic helices. As with Na channels, it is postulated that the charged segment may constitute the voltage sensor region, possibly moving outward on depolarization, causing a conformational change. The 6-helix bundle is a common structural motif in sodium channels (in which it is repeated 4 times within the sequence to form a 24-helix bundle), and in calcium channels (where it also forms a 24-helix bundle, which itself is tightly bound to 3 different subunits).

[1247] Ion channels play a role in regulating ion transport and signaling in virtually every cell in the human body.

### Summary of the Invention

[1248] The present invention is based, at least in part, on the discovery of novel ion channel family members, referred to herein as ion channel 47611, or “IC47611” nucleic acid and protein molecules. The IC47611 molecules of the present invention are useful as targets for developing modulating agents to regulate a variety of cellular processes, including ion transport (e.g., ion conductance); membrane excitability and/or polarization; synaptic transmission; signal transduction; cell activation, proliferation, growth, differentiation and/or migration; and muscle contraction. Accordingly, in one aspect, this invention provides isolated nucleic acid molecules encoding IC47611 proteins or biologically active portions thereof, as well as nucleic acid fragments suitable as primers or hybridization probes for the detection of IC47611-encoding nucleic acids.

[1249] In one embodiment, an IC47611 nucleic acid molecule of the invention is at least 50%, 55%, 60%, 65%, 70%, 75%, 80%, 85%, 90%, 95%, 96%, 97%, 98%, 99%, 99.1%, 99.2%, 99.3%, 99.4%, 99.5%, 99.6%, 99.7%, 99.8%, 99.9% or more identical to the nucleotide sequence (e.g., to the entire length of the nucleotide sequence) shown in SEQ ID NO:31 or 33 or the nucleotide sequence of the DNA insert of the plasmid deposited with ATCC as Accession Number ______, or a complement thereof.

[1250] In a preferred embodiment, the isolated nucleic acid molecule includes the nucleotide sequence shown SEQ ID NO:31 or 33, or a complement thereof. In another embodiment, the nucleic acid molecule includes SEQ ID NO:33 and nucleotides 1-366 of SEQ ID NO:31. In yet another embodiment, the nucleic acid molecule includes SEQ ID NO:33 and nucleotides 1729-4037 of SEQ ID NO:31. In another preferred embodiment, the nucleic acid molecule consists of the nucleotide sequence shown in SEQ ID NO:31 or 33. In another preferred embodiment, the nucleic acid molecule includes a fragment of at least 50 nucleotides (e.g., 50 contiguous nucleotides) of the nucleotide sequence of SEQ ID NO:31 or 33, or a complement thereof.

[1251] In another embodiment, an IC47611 nucleic acid molecule includes a nucleotide sequence encoding a protein having an amino acid sequence sufficiently identical to the amino acid sequence of SEQ ID NO:32 or an amino acid sequence encoded by the DNA insert of the plasmid deposited with ATCC as Accession Number ______. In a preferred embodiment, an IC47611 nucleic acid molecule includes a nucleotide sequence encoding a protein having an amino acid sequence at least 50%, 55%, 60%, 65%, 70%, 75%, 80%, 85%, 90%, 95%, 96%, 97%, 98%, 99%, 99.1%, 99.2%, 99.3%, 99.4%, 99.5%, 99.6%, 99.7%, 99.8%, 99.9% or more identical to the entire length of the amino acid sequence of SEQ ID NO:32 or the amino acid sequence encoded by the DNA insert of the plasmid deposited with ATCC as Accession Number ______.

[1252] In another preferred embodiment, an isolated nucleic acid molecule encodes the amino acid sequence of human IC47611. In yet another preferred embodiment, the nucleic acid molecule includes a nucleotide sequence encoding a protein having the amino acid sequence of SEQ ID NO:32 or the amino acid sequence encoded by the DNA insert of the plasmid deposited with ATCC as Accession Number ______. In yet another preferred embodiment, the nucleic acid molecule is at least 50 nucleotides in length. In a further preferred embodiment, the nucleic acid molecule is at least 50 nucleotides in length and encodes a protein having an IC47611 activity (as described herein).

[1253] Another embodiment of the invention features nucleic acid molecules, preferably IC47611 nucleic acid molecules, which specifically detect IC47611 nucleic acid molecules relative to nucleic acid molecules encoding non-IC47611 proteins. For example, in one embodiment, such a nucleic acid molecule is at least 50-100, 100-150, 150-200, 200-216, 216-250, 250-300, 300-340, 340-340, 340-350, 350-400, 400-438, 438-450, 450-500, 500-528, 528-542, 542-550, 550-600, 600-650, 650-700, 700-750, 750-764, 764-800, 800-841, 841-850, 850-900, 900-950, 950-1000, 1000-1050, 1050-1100, 1100-1150, 1150-1200, 1200-1250, 1250-1300, 1300-1350, 1350-1400, 1400-1450, 1450-1500, 1500-1550, 1550-1600, 1600-1650, 1650-1700, 1700-1750, 1750-1800, 1800-1850, 1850-1900, 1950-2000, 2000-2050, 2050-2100, 2100-2150, 2150-2200, 2250-2300, 2300-2350, 2350-2400, 2400-2450, 2450-2500, 2500-2550, 2550-2600, 2600-2650, 2650-2700, 2700-2750, 2750-2800, 2800-2850, 2850-2900, 2900-2950, 2950-3000, 3000-3050, 3050-3100, 3100-3150, 3150 -3200, 3200-3250, 3250-3300, 3300-3350, 3350-3400, 3400-3450, 3450-3500, 3500-3550, 3550-3600, 3600-3650, 3650-3700, 3700-3750, 3750-3800, 3800-3850, 3850-3900, 3900-3950, 3950-4000 or more nucleotides in length and hybridizes under stringent conditions to a nucleic acid molecule comprising the nucleotide sequence shown in SEQ ID NO:31, the nucleotide sequence of the DNA insert of the plasmid deposited with ATCC as Accession Number ______, or a complement thereof.

[1254] In preferred embodiments, the nucleic acid molecules are at least 15 (e.g., 15 contiguous) nucleotides in length and hybridize under stringent conditions to SEQ ID NO:31.

[1255] In other preferred embodiments, the nucleic acid molecule encodes a naturally occurring allelic variant of a polypeptide comprising the amino acid sequence of SEQ ID NO:32 or an amino acid sequence encoded by the DNA insert of the plasmid deposited with ATCC as Accession Number ______, wherein the nucleic acid molecule hybridizes to a nucleic acid molecule comprising SEQ ID NO:31 or 33 under stringent conditions.

[1256] Another embodiment of the invention provides an isolated nucleic acid molecule which is antisense to an IC47611 nucleic acid molecule, e.g., the coding strand of an IC47611 nucleic acid molecule.

[1257] Another aspect of the invention provides a vector comprising an IC47611 nucleic acid molecule. In certain embodiments, the vector is a recombinant expression vector. In another embodiment, the invention provides a host cell containing a vector of the invention. In yet another embodiment, the invention provides a host cell containing a nucleic acid molecule of the invention. The invention also provides a method for producing a protein, preferably an IC47611 protein, by culturing in a suitable medium, a host cell, e.g., a mammalian host cell such as a non-human mammalian cell, of the invention containing a recombinant expression vector, such that the protein is produced.

[1258] Another aspect of this invention features isolated or recombinant IC47611 proteins and polypeptides. In one embodiment, an isolated IC47611 protein has one or more of the following domains: a transmembrane domain, an inward-rectifier potassium channel (IRK) domain, and an inward-rectifier potassium channel (IRK)-related domain. In a preferred embodiment, an IC47611 protein includes at least one or more of the following domains: a transmembrane domain, an inward-rectifier potassium channel (IRK) domain, and an inward-rectifier potassium channel (IRK)-related domain, and has an amino acid sequence at least about 50%, 55%, 60%, 65%, 67%, 68%, 70%, 75%, 80%, 85%, 90%, 95%, 96%, 97%, 98%, 99%, 99.1%, 99.2%, 99.3%, 99.4%, 99.5%, 99.6%, 99.7%, 99.8%, 99.9% or more identical to the amino acid sequence of SEQ ID NO:32, or the amino acid sequence encoded by the DNA insert of the plasmid deposited with ATCC as Accession Number ______. In another preferred embodiment, an IC47611 protein includes at least one transmembrane domain and has an IC47611 activity (as described herein).

[1259] In yet another preferred embodiment, an IC47611 protein includes one or more of the following domains: a transmembrane domain, an inward-rectifier potassium channel (IRK) domain, and an inward-rectifier potassium channel (IRK)-related domain, and is encoded by a nucleic acid molecule having a nucleotide sequence which hybridizes under stringent hybridization conditions to a nucleic acid molecule comprising the nucleotide sequence of SEQ ID NO:31 or 33.

[1260] In another embodiment, the invention features fragments of the protein having the amino acid sequence of SEQ ID NO:32, wherein the fragment comprises at least 15 amino acids (e.g., contiguous amino acids) of the amino acid sequence of SEQ ID NO:32, or an amino acid sequence encoded by the DNA insert of the plasmid deposited with the ATCC as Accession Number ______. In another embodiment, an IC47611 protein has the amino acid sequence of SEQ ID NO:32.

[1261] In another embodiment, the invention features an IC47611 protein which is encoded by a nucleic acid molecule consisting of a nucleotide sequence at least about 50%, 55%, 60%, 65%, 70%, 75%, 80%, 85%, 90%, 95%, 96%, 97%, 98%, 99%, 99.1%, 99.2%, 99.3%, 99.4%, 99.5%, 99.6%, 99.7%, 99.8%, 99.9% or more identical to a nucleotide sequence of SEQ ID NO:31 or 33, or a complement thereof. This invention further features an IC47611 protein, which is encoded by a nucleic acid molecule consisting of a nucleotide sequence which hybridizes under stringent hybridization conditions to a nucleic acid molecule comprising the nucleotide sequence of SEQ ID NO:31 or 33, or a complement thereof.

[1262] The proteins of the present invention or portions thereof, e.g., biologically active portions thereof, can be operatively linked to a non-IC47611 polypeptide (e.g., heterologous amino acid sequences) to form fusion proteins. The invention further features antibodies, such as monoclonal or polyclonal antibodies, that specifically bind proteins of the invention, preferably IC47611 proteins. In addition, the IC47611 proteins or biologically active portions thereof can be incorporated into pharmaceutical compositions, which optionally include pharmaceutically acceptable carriers.

[1263] In another aspect, the present invention provides a method for detecting the presence of an IC47611 nucleic acid molecule, protein, or polypeptide in a biological sample by contacting the biological sample with an agent capable of detecting an IC47611 nucleic acid molecule, protein, or polypeptide such that the presence of an IC47611 nucleic acid molecule, protein or polypeptide is detected in the biological sample.

[1264] In another aspect, the present invention provides a method for detecting the presence of IC47611 activity in a biological sample by contacting the biological sample with an agent capable of detecting an indicator of IC47611 activity such that the presence of IC47611 activity is detected in the biological sample.

[1265] In another aspect, the invention provides a method for modulating IC47611 activity comprising contacting a cell capable of expressing IC47611 with an agent that modulates IC47611 activity such that IC47611 activity in the cell is modulated. In one embodiment, the agent inhibits IC47611 activity. In another embodiment, the agent stimulates IC47611 activity. In one embodiment, the agent is an antibody that specifically binds to an IC47611 protein. In another embodiment, the agent modulates expression of IC47611 by modulating transcription of an IC47611 gene or translation of an IC47611 mRNA. In yet another embodiment, the agent is a nucleic acid molecule having a nucleotide sequence that is antisense to the coding strand of an IC47611 mRNA or an IC47611 gene.

[1266] In one embodiment, the methods of the present invention are used to treat a subject having a disorder characterized by aberrant or unwanted IC47611 protein or nucleic acid expression or activity by administering an agent which is an IC47611 modulator to the subject. In one embodiment, the IC47611 modulator is an IC47611 protein. In another embodiment the IC47611 modulator is an IC47611 nucleic acid molecule. In yet another embodiment, the IC47611 modulator is a peptide, peptidomimetic, or other small molecule. In a preferred embodiment, the disorder characterized by aberrant or unwanted IC47611 protein or nucleic acid expression is a CNS disorder, such as a cognitive or neurodegenerative disorder. In another preferred embodiment, the disorder characterized by aberrant or unwanted IC47611 protein or nucleic acid expression is a cardiovascular disorder. In another preferred embodiment, the disorder characterized by aberrant or unwanted IC47611 protein or nucleic acid expression is a muscular disorder. In another embodiment, the disorder characterized by aberrant or unwanted IC47611 activity is a pain disorder. In another embodiment, the disorder characterized by aberrant or unwanted IC47611 activity is a cell proliferation, growth, differentiation, or migration disorder.

[1267] The present invention also provides diagnostic assays for identifying the presence or absence of a genetic alteration characterized by at least one of (i) aberrant modification or mutation of a gene encoding an IC47611 protein; (ii) mis-regulation of the gene; and (iii) aberrant post-translational modification of an IC47611 protein, wherein a wild-type form of the gene encodes a protein with an IC47611 activity.

[1268] In another aspect the invention provides methods for identifying a compound that binds to or modulates the activity of an IC47611 protein, by providing an indicator composition comprising an IC47611 protein having IC47611 activity, contacting the indicator composition with a test compound, and determining the effect of the test compound on IC47611 activity in the indicator composition to identify a compound that modulates the activity of an IC47611 protein.

[1269] Other features and advantages of the invention will be apparent from the following detailed description and claims.

### Detailed Description of the Invention

[1270] The present invention is based, at least in part, on the discovery of novel molecules, referred to herein as IC47611 (for ion channel 47611) nucleic acid and protein molecules, which are novel members of the ion channel family. These novel molecules are capable of, for example, modulating ion transport in an electrically excitable cell (e.g., a neuronal or muscle (e.g., cardiac muscle) cell), or in a non-electrically excitable cell, e.g., a spleen cell.

[1271] As used herein, the term “ion channel” includes a protein or polypeptide which is involved in receiving, conducting, and transmitting signals in an cell (e.g., an electrically excitable cell, for example, a neuronal or muscle cell). Ion channels can determine membrane excitability (the ability of, for example, a cell to respond to a stimulus and to convert it into a sensory impulse). Ion channels can also influence the resting potential of membranes, wave forms and frequencies of action potentials, and thresholds of excitation. Ion channels are typically expressed in electrically excitable cells, e.g., neuronal cells, and may form heteromultimeric structures (e.g., composed of more than one type of subunit). Ion channels may also be found in non-excitable cells (e.g., endothelial cells or spleen cells), where they may play a role in, for example, signal transduction. As the IC47611 molecules of the present invention may modulate ion channel mediated activities, they may be useful for developing novel diagnostic and therapeutic agents for ion channel associated disorders.

[1272] As used herein, an “ion channel associated disorder” includes a disorder, disease or condition which is characterized by a misregulation of an ion channel mediated activity. Ion channel associated disorders can detrimentally affect conveyance of sensory impulses from the periphery to the brain and/or conductance of motor impulses from the brain to the periphery; integration of reflexes; interpretation of sensory impulses; cellular proliferation, growth, differentiation, or migration, and emotional, intellectual (e.g., learning and memory), or motor processes. Examples of ion channel associated disorders include CNS disorders such as cognitive and neurodegenerative disorders, examples of which include, but are not limited to, Alzheimer's disease, dementias related to Alzheimer's disease (such as Pick's disease), Parkinson's and other Lewy diffuse body diseases, senile dementia, Huntington's disease, Gilles de la Tourette's syndrome, multiple sclerosis, amyotrophic lateral sclerosis, progressive supranuclear palsy, epilepsy, and Jakob-Creutzfieldt disease; autonomic function disorders such as hypertension and sleep disorders, and neuropsychiatric disorders, such as depression, schizophrenia, schizoaffective disorder, korsakoff's psychosis, mania, anxiety disorders, or phobic disorders; learning or memory disorders, e.g., amnesia or age-related memory loss, attention deficit disorder, dysthymic disorder, major depressive disorder, mania, obsessive-compulsive disorder, psychoactive substance use disorders, anxiety, phobias, panic disorder, as well as bipolar affective disorder, e.g., severe bipolar affective (mood) disorder (BP-1), and bipolar affective neurological disorders, e.g., migraine and obesity. Further CNS-related disorders include, for example, those listed in the American Psychiatric Association's Diagnostic and Statistical manual of Mental Disorders (DSM), the most current version of which is incorporated herein by reference in its entirety.

[1273] Ion channel disorders also include pain disorders. The IC47611 molecules of the present invention may be present on sensory neurons and, thus, may be involved in detecting, for example, noxious chemical, mechanical, or thermal stimuli and transducing this information into membrane depolarization events. Thus, the IC47611 molecules by participating in pain signaling mechanisms, may modulate pain elicitation and act as targets for developing novel diagnostic targets and therapeutic agents to control pain.

[1274] Further examples of ion channel associated disorders include cardiac-related disorders. Cardiovascular system disorders in which the IC47611 molecules of the invention may be directly or indirectly involved include arteriosclerosis, ischemia reperfusion injury, restenosis, arterial inflammation, vascular wall remodeling, ventricular remodeling, rapid ventricular pacing, coronary microembolism, tachycardia, bradycardia, pressure overload, aortic bending, coronary artery ligation, vascular heart disease, atrial fibrilation, Jervell syndrome, Lange-Nielsen syndrome, long-QT syndrome, congestive heart failure, sinus node dysfunction, angina, heart failure, hypertension, atrial fibrillation, atrial flutter, dilated cardiomyopathy, idiopathic cardiomyopathy, myocardial infarction, coronary artery disease, coronary artery spasm, and arrhythmia. IC47611-mediated or related disorders also include disorders of the musculoskeletal system such as paralysis and muscle weakness, e.g., ataxia, myotonia, and myokymia.

[1275] Ion channel disorders also include cellular proliferation, growth, differentiation, or migration disorders. Cellular proliferation, growth, differentiation, or migration disorders include those disorders that affect cell proliferation, growth, differentiation, or migration processes. As used herein, a “cellular proliferation, growth, differentiation, or migration process” is a process by which a cell increases in number, size or content, by which a cell develops a specialized set of characteristics which differ from that of other cells, or by which a cell moves closer to or further from a particular location or stimulus. The IC47611 molecules of the present invention are involved in signal transduction mechanisms, which are known to be involved in cellular growth, differentiation, and migration processes. Thus, the IC47611 molecules may modulate cellular growth, differentiation, or migration, and may play a role in disorders characterized by aberrantly regulated growth, differentiation, or migration. Such disorders include cancer, e.g., carcinoma, sarcoma, or leukemia; tumor angiogenesis and metastasis; skeletal dysplasia; neuronal deficiencies resulting from impaired neural induction and patterning; neurodegenerative disorders, e.g., Alzheimer's disease, dementias related to Alzheimer's disease (such as Pick's disease), Parkinson's and other Lewy diffuse body diseases, multiple sclerosis, amyotrophic lateral sclerosis, progressive supranuclear palsy, epilepsy, Jakob-Creutzfieldt disease, or AIDS related dementia; hepatic disorders; cardiovascular disorders; and hematopoietic and/or myeloproliferative disorders.

[1276] IC47611-associated or related disorders also include disorders of tissues in which IC47611 protein is expressed.

[1277] As used herein, an “ion channel mediated activity” includes an activity which involves an ion channel, e.g., an ion channel associated with receiving, conducting, and transmitting signals, in electrically excitable or non-electrically excitable cells. Ion channel mediated activities include release of neurotransmitters or second messenger molecules, e.g., dopamine or norepinephrine, from cells, e.g., neuronal cells; modulation of resting potential of membranes, wave forms and frequencies of action potentials, and thresholds of excitation; participation in signal transduction pathways; and modulation of processes such as integration of sub-threshold synaptic responses and the conductance of back-propagating action potentials in, for example, neuronal cells (e.g., changes in those action potentials resulting in a morphological or differentiative response in the cell).

[1278] The term “family” when referring to the protein and nucleic acid molecules of the invention is intended to mean two or more proteins or nucleic acid molecules having a common structural domain or motif and having sufficient amino acid or nucleotide sequence homology as defined herein. Such family members can be naturally or non-naturally occurring and can be from either the same or different species. For example, a family can contain a first protein of human origin, as well as other, distinct proteins of human origin or alternatively, can contain homologues of non-human origin, e.g., monkey proteins. Members of a family may also have common functional characteristics.

[1279] For example, the family of IC47611 proteins comprises at least one “transmembrane domain” and preferably two transmembrane domains. As used herein, the term “transmembrane domain” includes an amino acid sequence of about 15 amino acid residues in length which spans the plasma membrane. More preferably, a transmembrane domain includes about at least 20, 25, 30, 35, 40, or 45 amino acid residues and spans the plasma membrane. Transmembrane domains are rich in hydrophobic residues, and typically have an alpha-helical structure. In a preferred embodiment, at least 50%, 60%, 70%, 80%, 90%, 95% or more of the amino acids of a transmembrane domain are hydrophobic, e.g., leucines, isoleucines, tyrosines, or tryptophans. Transmembrane domains are described in, for example, Zagotta W. N. et al., (1996) Annu. Rev. Neurosci. 19: 235-263, the contents of which are incorporated herein by reference. Amino acid residues 108-132 and 180-204 of the native IC47611 protein are predicted to comprise transmembrane domains (see FIGS. 25 and 26). Accordingly, IC47611 proteins having at least 50-60% homology, preferably about 60-70%, more preferably about 70-80%, or about 80-90% homology with a transmembrane domain of human IC47611 are within the scope of the invention.

[1280] In another embodiment, an IC47611 molecule of the present invention is identified based on the presence of an “an inward-rectifier potassium channel (IRK) domain” in the protein or corresponding nucleic acid molecule. Inward-rectifier potassium channel (IRK) domains are described in Doupnik et al. (1995) Curr. Opin. Neurobiol. 5: 268-277. As used herein, the term “inward-rectifier potassium channel (IRK) domain” includes a protein domain having an amino acid sequence of about 250-400 amino acid residues and having a bit score for the alignment of the sequence to the inward-rectifier potassium channel (IRK) domain of at least 713-835. Preferably, an inward-rectifier potassium channel (IRK) domain includes at least about 300-350, or more preferably about 328-330 amino acid residues, and has a bit score for the alignment of the sequence to the inward-rectifier potassium channel (IRK) domain of at least 50, 100, 150, 200, 250, 300, 350, 400, 450, 500, 550, 600, 650, 700 or higher. The inward-rectifier potassium channel (IRK) domain has been assigned Pfam accession number PF01007 (http:/Hgenome.wustl.edu/Pfam/html). To identify the presence of an inward-rectifier potassium channel (IRK) domain in an IC47611 protein, and make the determination that a protein of interest has a particular profile, the amino acid sequence of the protein is searched against a database of known protein domains (e.g., the HMM database) using the default parameters. A search was performed against the HMM database resulting in the identification of an inward-rectifier potassium channel (IRK) domain in the amino acid sequence of human IC47611 (SEQ ID NO:32) at about residues 72-399 of SEQ ID NO:32. The results of the search are set forth in FIG. 27. A search was also performed against the ProDom database, resulting in the identification of an inward-rectifier potassium channel (IRK) domain in the amino acid sequence of human IC47611 (SEQ ID NO:32) at about residues 74-403 of SEQ ID NO:32. The results of the search are set forth in FIG. 28.

[1281] In another embodiment, an IC47611 molecule of the present invention is identified based on the presence of an “inward-rectifier potassium channel (IRK)-related domain” in the protein or corresponding nucleic acid molecule. As used herein, the term “inward-rectifier potassium channel (IRK)-related domain” includes a protein domain having an amino acid sequence of about 20-70 amino acid residues and having a bit score for the alignment of the sequence to the inward-rectifier potassium channel (IRK)-related domain of at least 185. Preferably, an inward-rectifier potassium channel (IRK)-related domain includes at least about 30-50, or more preferably about 38 amino acid residues, and has a bit score for the alignment of the sequence to the IC47611 amino acid sequence of at least 20, 25, 30, 35, 40, 45, 50, 55, 60, 65, 70, 80, 90, 100, 110, 120, 130, 140, 150, 160, 170, 180 or higher. The inward-rectifier potassium channel (IRK)-related domain has been assigned ProDom entry 60703. To identify the presence of an inward-rectifier potassium channel (IRK)-related domain in an IC47611 protein, and make the determination that a protein of interest has a particular profile, the amino acid sequence of the protein is searched against a database of known protein domains (e.g., the ProDom database) using the default parameters (available at http://www.toulouse.inra.fr/prodom.html). A search was performed against the ProDom database resulting in the identification of an inward-rectifier potassium channel (IRK)-related domain in the amino acid sequence of human IC47611 (SEQ ID NO:32) at about residues 36-73 of SEQ ID NO:32. The results of the search are set forth in FIG. 28.

[1282] In a preferred embodiment, the IC47611 molecules of the invention include at least one transmembrane domain, an inward-rectifier potassium channel (IRK) domain, and an inward-rectifier potassium channel (IRK)-related domain.

[1283] Isolated proteins of the present invention, preferably IC47611 proteins, have an amino acid sequence sufficiently identical to the amino acid sequence of SEQ ID NO:32 or are encoded by a nucleotide sequence sufficiently identical to SEQ ID NO:31 or 33. As used herein, the term “sufficiently identical” refers to a first amino acid or nucleotide sequence which contains a sufficient or minimum number of identical or equivalent (e.g., an amino acid residue which has a similar side chain) amino acid residues or nucleotides to a second amino acid or nucleotide sequence such that the first and second amino acid or nucleotide sequences share common structural domains or motifs and/or a common functional activity. For example, amino acid or nucleotide sequences which share common structural domains have at least 30%, 40%, or 50% homology, preferably 60% homology, more preferably 70%-80%, and even more preferably 90-95% homology across the amino acid sequences of the domains and contain at least one and preferably two structural domains or motifs, are defined herein as sufficiently identical. Furthermore, amino acid or nucleotide sequences which share at least 30%, 40%, or 50%, preferably 60%, more preferably 70-80%, or 90-95% homology and share a common functional activity are defined herein as sufficiently identical.

[1284] As used interchangeably herein, an “IC47611 activity”, “biological activity of IC47611” or “functional activity of IC47611”, refers to an activity exerted by an IC47611 protein, polypeptide or nucleic acid molecule on an IC47611 responsive cell or tissue, or on an IC47611 protein substrate, as determined in vivo, or in vitro, according to standard techniques. In one embodiment, an IC47611 activity is a direct activity, such as an association with an IC47611-target molecule. As used herein, a “target molecule” or “binding partner” is a molecule with which an IC47611 protein binds or interacts in nature, such that IC47611-mediated function is achieved. An IC47611 target molecule can be a non-IC47611 molecule or an IC47611 protein or polypeptide of the present invention. In an exemplary embodiment, an IC47611 target molecule is an IC47611 ligand, e.g., an ion channel pore-forming subunit or an ion channel ligand. Alternatively, an IC47611 activity is an indirect activity, such as a cellular signaling activity mediated by interaction of the IC47611 protein with an IC47611 ligand. The biological activities of IC47611 are described herein. For example, the IC47611 proteins of the present invention can have one or more of the following activities: (1) modulation of membrane excitability, (2) modulation of intracellular ion concentration, (3) modulation of membrane polarization (e.g., membrane polarization and/or depolarization), (4) modulation of action potential, (5) modulation of cellular signal transduction, (6) modulation of neurotransmitter release (e.g., from neuronal cells), (7) modulation of synaptic transmission, (8) modulation of neuronal excitability and/or plasticity, (9) modulation of muscle contraction, (10) modulation of cell activation (e.g., T cell activation), and/or (11) modulation of cellular proliferation, growth, migration and/or differentiation.

[1285] Accordingly, another embodiment of the invention features isolated IC47611 proteins and polypeptides having an IC47611 activity. Preferred proteins are IC47611 proteins having one or more of the following domains: a transmembrane domain, an inward-rectifier potassium channel (IRK) domain, and an inward-rectifier potassium channel (IRK)-related domain, and, preferably, an IC47611 activity. Yet other preferred proteins are IC47611 proteins having at least one transmembrane domain, an inward-rectifier potassium channel (IRK) domain, and an inward-rectifier potassium channel (IRK)-related domain, and, preferably, an IC47611 activity.

[1286] Additional preferred proteins have one or more of the following domains: a transmembrane domain, an inward-rectifier potassium channel (IRK) domain, and an inward-rectifier potassium channel (IRK)-related domain, and are, preferably, encoded by a nucleic acid molecule having a nucleotide sequence which hybridizes under stringent hybridization conditions to a nucleic acid molecule comprising the nucleotide sequence of SEQ ID NO:31 or 33.

[1287] The nucleotide sequence of the isolated human IC47611 cDNA and the predicted amino acid sequence of the human IC47611 polypeptide are shown in FIGS. 24A-C and in SEQ ID NOs:31 and 33, respectively. A plasmid containing the nucleotide sequence encoding human IC47611 was deposited with the American Type Culture Collection (ATCC), 10801 University Boulevard, Manassas, Va. 20110-2209, on ______ and assigned Accession Number ______. This deposit will be maintained under the terms of the Budapest Treaty on the International Recognition of the Deposit of Microorganisms for the Purposes of Patent Procedure. This deposit was made merely as a convenience for those of skill in the art and is not an admission that a deposit is required under 35 U.S.C. §112.

[1288] The human IC47611 gene, which is approximately 4037 nucleotides in length, encodes a protein having a molecular weight of approximately 51.3 kD and which is approximately 453 amino acid residues in length.

[1289] Various aspects of the invention are described in further detail in the following subsections:

[1290] I. Isolated Nucleic Acid Molecules

[1291] One aspect of the invention pertains to isolated nucleic acid molecules that encode IC47611 proteins or biologically active portions thereof, as well as nucleic acid fragments sufficient for use as hybridization probes to identify IC47611-encoding nucleic acid molecules (e.g., IC47611 mRNA) and fragments for use as PCR primers for the amplification or mutation of IC47611 nucleic acid molecules. As used herein, the term “nucleic acid molecule” is intended to include DNA molecules (e.g., cDNA or genomic DNA) and RNA molecules (e.g., mRNA) and analogs of the DNA or RNA generated using nucleotide analogs. The nucleic acid molecule can be single-stranded or double-stranded, but preferably is double-stranded DNA.

[1292] The term “isolated nucleic acid molecule” includes nucleic acid molecules which are separated from other nucleic acid molecules which are present in the natural source of the nucleic acid. For example, with regards to genomic DNA, the term “isolated” includes nucleic acid molecules which are separated from the chromosome with which the genomic DNA is naturally associated. Preferably, an “isolated” nucleic acid is free of sequences which naturally flank the nucleic acid (i.e., sequences located at the 5′ and 3′ ends of the nucleic acid) in the genomic DNA of the organism from which the nucleic acid is derived. For example, in various embodiments, the isolated IC47611 nucleic acid molecule can contain less than about 5 kb, 4 kb, 3 kb, 2 kb, 1 kb, 0.5 kb or 0.1 kb of nucleotide sequences which naturally flank the nucleic acid molecule in genomic DNA of the cell from which the nucleic acid is derived. Moreover, an “isolated” nucleic acid molecule, such as a cDNA molecule, can be substantially free of other cellular material, or culture medium when produced by recombinant techniques, or substantially free of chemical precursors or other chemicals when chemically synthesized.

[1293] A nucleic acid molecule of the present invention, e.g., a nucleic acid molecule having the nucleotide sequence of SEQ ID NO:31 or 33, or the nucleotide sequence of the DNA insert of the plasmid deposited with ATCC as Accession Number ______, or a portion thereof, can be isolated using standard molecular biology techniques and the sequence information provided herein. Using all or portion of the nucleic acid sequence of SEQ ID NO:31 or 33, or the nucleotide sequence of the DNA insert of the plasmid deposited with ATCC as Accession Number ______, as a hybridization probe, IC47611 nucleic acid molecules can be isolated using standard hybridization and cloning techniques (e.g., as described in Sambrook, J., Fritsh, E. F., and Maniatis, T. Molecular Cloning: A Laboratory Manual. 2nd, ed., Cold Spring Harbor Laboratory, Cold Spring Harbor Laboratory Press, Cold Spring Harbor, N.Y., 1989).

[1294] Moreover, a nucleic acid molecule encompassing all or a portion of SEQ ID NO:31 or 33, or the nucleotide sequence of the DNA insert of the plasmid deposited with ATCC as Accession Number ______ can be isolated by the polymerase chain reaction (PCR) using synthetic oligonucleotide primers designed based upon the sequence of SEQ ID NO:31 or 33, or the nucleotide sequence of the DNA insert of the plasmid deposited with ATCC as Accession Number ______.

[1295] A nucleic acid of the invention can be amplified using cDNA, mRNA or alternatively, genomic DNA, as a template and appropriate oligonucleotide primers according to standard PCR amplification techniques. The nucleic acid so amplified can be cloned into an appropriate vector and characterized by DNA sequence analysis. Furthermore, oligonucleotides corresponding to IC47611 nucleotide sequences can be prepared by standard synthetic techniques, e.g., using an automated DNA synthesizer.

[1296] In a preferred embodiment, an isolated nucleic acid molecule of the invention comprises the nucleotide sequence shown in SEQ ID NO:31. This cDNA comprises sequences encoding the human IC47611 protein (i.e., “the coding region”, from nucleotides 367-1728), as well as 5′ untranslated sequences (nucleotides 1-366) and 3′ untranslated sequences (nucleotides 1729-4037). Alternatively, the nucleic acid molecule can comprise only the coding region of SEQ ID NO:31 (e.g, nucleotides 367-1728, corresponding to SEQ ID NO:33).

[1297] In another preferred embodiment, an isolated nucleic acid molecule of the invention comprises a nucleic acid molecule which is a complement of the nucleotide sequence shown in SEQ ID NO:31 or 33, or the nucleotide sequence of the DNA insert of the plasmid deposited with ATCC as Accession Number ______, or a portion of any of these nucleotide sequences. A nucleic acid molecule which is complementary to the nucleotide sequence shown in SEQ ID NO:31 or 33, or the nucleotide sequence of the DNA insert of the plasmid deposited with ATCC as Accession Number ______, is one which is sufficiently complementary to the nucleotide sequence shown in SEQ ID NO:31 or 33, or the nucleotide sequence of the DNA insert of the plasmid deposited with ATCC as Accession Number ______, such that it can hybridize to the nucleotide sequence shown in SEQ ID NO:31 or 33, or the nucleotide sequence of the DNA insert of the plasmid deposited with ATCC as Accession Number ______, thereby forming a stable duplex.

[1298] In still another preferred embodiment, an isolated nucleic acid molecule of the present invention comprises a nucleotide sequence which is at least about 50%, 55%, 60%, 65%, 70%, 75%, 80%, 85%, 90%, 95%, 96%, 97%, 98%, 99%, 99.1%, 99.2%, 99.3%, 99.4%, 99.5%, 99.6%, 99.7%, 99.8%, 99.9% or more identical to the entire length of the nucleotide sequence shown in SEQ ID NO:31 or 33, or the entire length of the nucleotide sequence of the DNA insert of the plasmid deposited with ATCC as Accession Number ______, or a portion of any of these nucleotide sequences.

[1299] Moreover, the nucleic acid molecule of the invention can comprise only a portion of the nucleic acid sequence of SEQ ID NO:31 or 33, or the nucleotide sequence of the DNA insert of the plasmid deposited with ATCC as Accession Number ______, for example, a fragment which can be used as a probe or primer or a fragment encoding a portion of an IC47611 protein, e.g., a biologically active portion of an IC47611 protein. The nucleotide sequence determined from the cloning of the IC47611 gene allows for the generation of probes and primers designed for use in identifying and/or cloning other IC47611 family members, as well as IC47611 homologues from other species. The probe/primer typically comprises substantially purified oligonucleotide. The oligonucleotide typically comprises a region of nucleotide sequence that hybridizes under stringent conditions to at least about 12 or 15, preferably about 20 or 25, more preferably about 30, 35, 40, 45, 50, 55, 60, 65, or 75 consecutive nucleotides of a sense sequence of SEQ ID NO:31 or 33, or the nucleotide sequence of the DNA insert of the plasmid deposited with ATCC as Accession Number ______, of an anti-sense sequence of SEQ ID NO:31 or 33, or the nucleotide sequence of the DNA insert of the plasmid deposited with ATCC as Accession Number ______, or of a naturally occurring allelic variant or mutant of SEQ ID NO:31 or 33, or the nucleotide sequence of the DNA insert of the plasmid deposited with ATCC as Accession Number ______. In one embodiment, a nucleic acid molecule of the present invention comprises a nucleotide sequence which is greater than 50-100, 100-150, 150-200, 200-216, 216-250, 250-300, 300-340, 340-350, 350-400, 400-438, 438-450, 450-500, 500-528, 528-542, 542-550, 550-600, 600-650, 650-700, 700-750, 750-764, 764-800, 800-841, 841-850, 850-900, 900-950, 950-1000, 1000-1050, 1050-1100, 1100-1150, 1150-1200, 1200-1250, 1250-1300, 1300-1350, 1350-1400, 1400-1450, 1450-1500, 1500-1550, 1550-1600, 1600-1650, 1650-1700, 1700-1750, 1750-1800, 1800-1850, 1850-1900, 1950-2000, 2000-2050, 2050-2100, 2100-2150, 2150-2200, 2250-2300, 2300-2350, 2350-2400, 2400-2450, 2450-2500, 2500-2550, 2550-2600, 2600-2650, 2650-2700, 2700-2750, 2750-2800, 2800-2850, 2850-2900, 2900-2950, 2950-3000, 3000-3050, 3050-3100, 3100-3150, 3150-3200, 3200-3250, 3250-3300, 3300-3350, 3350-3400, 3400-3450, 3450-3500, 3500-3550, 3550-3600, 3600-3650, 3650-3700, 3700-3750, 3750-3800, 3800-3850, 3850-3900, 3900-3950, 3950-4000 or more nucleotides in length and hybridizes under stringent hybridization conditions to a nucleic acid molecule of SEQ ID NO:31 or 33, or the nucleotide sequence of the DNA insert of the plasmid deposited with ATCC as Accession Number ______.

[1300] Probes based on the IC47611 nucleotide sequences can be used to detect transcripts or genomic sequences encoding the same or homologous proteins. In preferred embodiments, the probe further comprises a label group attached thereto, e.g., the label group can be a radioisotope, a fluorescent compound, an enzyme, or an enzyme co-factor. Such probes can be used as a part of a diagnostic test kit for identifying cells or tissue which misexpress an IC47611 protein, such as by measuring a level of an IC47611-encoding nucleic acid in a sample of cells from a subject e.g., detecting IC47611 mRNA levels or determining whether a genomic IC47611 gene has been mutated or deleted.

[1301] A nucleic acid fragment encoding a “biologically active portion of an IC47611 protein” can be prepared by isolating a portion of the nucleotide sequence of SEQ ID NO:31 or 33, or the nucleotide sequence of the DNA insert of the plasmid deposited with ATCC as Accession Number ______, which encodes a polypeptide having an IC47611 biological activity (the biological activities of the IC47611 proteins are described herein), expressing the encoded portion of the IC47611 protein (e.g., by recombinant expression in vitro) and assessing the activity of the encoded portion of the IC47611 protein.

[1302] The invention further encompasses nucleic acid molecules that differ from the nucleotide sequence shown in SEQ ID NO:31 or 33, or the nucleotide sequence of the DNA insert of the plasmid deposited with ATCC as Accession Number ______, due to degeneracy of the genetic code and thus encode the same IC47611 proteins as those encoded by the nucleotide sequence shown in SEQ ID NO:31 or 33, or the nucleotide sequence of the DNA insert of the plasmid deposited with ATCC as Accession Number ______. In another embodiment, an isolated nucleic acid molecule of the invention has a nucleotide sequence encoding a protein having an amino acid sequence shown in SEQ ID NO:32.

[1303] In addition to the IC47611 nucleotide sequences shown in SEQ ID NO:31 or 33, or the nucleotide sequence of the DNA insert of the plasmid deposited with ATCC as Accession Number ______, it will be appreciated by those skilled in the art that DNA sequence polymorphisms that lead to changes in the amino acid sequences of the IC47611 proteins may exist within a population (e.g., the human population). Such genetic polymorphism in the IC47611 genes may exist among individuals within a population due to natural allelic variation. As used herein, the terms “gene” and “recombinant gene” refer to nucleic acid molecules which include an open reading frame encoding an IC47611 protein, preferably a mammalian IC47611 protein, and can further include non-coding regulatory sequences, and introns.

[1304] Allelic variants of human IC47611 include both functional and non-functional IC47611 proteins. Functional allelic variants are naturally occurring amino acid sequence variants of the human IC47611 protein that maintain the ability to bind an IC47611 ligand or substrate and/or modulate cell proliferation and/or migration mechanisms. Functional allelic variants will typically contain only conservative substitution of one or more amino acids of SEQ ID NO:32, or substitution, deletion or insertion of non-critical residues in non-critical regions of the protein.

[1305] Non-functional allelic variants are naturally occurring amino acid sequence variants of the human IC47611 protein that do not have the ability to either bind an IC47611 ligand and/or modulate any of the IC47611 activities described herein. Non-functional allelic variants will typically contain a non-conservative substitution, a deletion, or insertion or premature truncation of the amino acid sequence of SEQ ID NO:32, or a substitution, insertion or deletion in critical residues or critical regions.

[1306] The present invention further provides non-human orthologues of the human IC47611 protein. Orthologues of the human IC47611 protein are proteins that are isolated from non-human organisms and possess the same IC47611 ligand binding and/or modulation of membrane excitability activities of the human IC47611 protein. Orthologues of the human IC47611 protein can readily be identified as comprising an amino acid sequence that is substantially identical to SEQ ID NO:32.

[1307] Moreover, nucleic acid molecules encoding other IC47611 family members and, thus, which have a nucleotide sequence which differs from the IC47611 sequences of SEQ ID NO:31 or 33, or the nucleotide sequence of the DNA insert of the plasmid deposited with ATCC as Accession Number ______ are intended to be within the scope of the invention. For example, another IC47611 cDNA can be identified based on the nucleotide sequence of human IC47611. Moreover, nucleic acid molecules encoding IC47611 proteins from different species, and which, thus, have a nucleotide sequence which differs from the IC47611 sequences of SEQ ID NO:31 or 33, or the nucleotide sequence of the DNA insert of the plasmid deposited with ATCC as Accession Number ______ are intended to be within the scope of the invention. For example, a mouse IC47611 cDNA can be identified based on the nucleotide sequence of a human IC47611.

[1308] Nucleic acid molecules corresponding to natural allelic variants and homologues of the IC47611 cDNAs of the invention can be isolated based on their homology to the IC47611 nucleic acids disclosed herein using the cDNAs disclosed herein, or a portion thereof, as a hybridization probe according to standard hybridization techniques under stringent hybridization conditions. Nucleic acid molecules corresponding to natural allelic variants and homologues of the IC47611 cDNAs of the invention can further be isolated by mapping to the same chromosome or locus as the IC47611 gene.

[1309] Accordingly, in another embodiment, an isolated nucleic acid molecule of the invention is at least 15, 20, 25, 30 or more nucleotides in length and hybridizes under stringent conditions to the nucleic acid molecule comprising the nucleotide sequence of SEQ ID NO:31 or 33, or the nucleotide sequence of the DNA insert of the plasmid deposited with ATCC as Accession Number ______. In other embodiment, the nucleic acid is at least 50-100, 100-150, 150-200, 200-216, 216-250, 250-300, 300-340, 340-350, 350-400, 400-438, 438-450, 450-500, 500-528, 528-542, 542-550, 550-600, 600-650, 650-700, 700-750, 750-764, 764-800, 800-841, 841-850, 850-900, 900-950, 950-1000, 1000-1050, 1050-1100, 1100-1150, 1150-1200, 1200-1250, 1250-1300, 1300-1350, 1350-1400, 1400-1450, 1450-1500, 1500-1550, 1550-1600, 1600-1650, 1650-1700, 1700-1750, 1750-1800, 1800-1850, 1850-1900, 1950-2000, 2000-2050, 2050-2100, 2100-2150, 2150-2200, 2250-2300, 2300-2350, 2350-2400, 2400-2450, 2450-2500, 2500-2550, 2550-2600, 2600-2650, 2650-2700, 2700-2750, 2750-2800, 2800-2850, 2850-2900, 2900-2950, 2950-3000, 3000-3050, 3050-3100, 3100-3150, 3150-3200, 3200-3250, 3250-3300, 3300-3350, 3350-3400, 3400-3450, 3450-3500, 3500-3550, 3550-3600, 3600-3650, 3650-3700, 3700-3750, 3750-3800, 3800-3850, 3850-3900, 3900-3950, 3950-4000 or more nucleotides in length.

[1310] As used herein, the term “hybridizes under stringent conditions” is intended to describe conditions for hybridization and washing under which nucleotide sequences that are significantly identical or homologous to each other remain hybridized to each other. Preferably, the conditions are such that sequences at least about 70%, more preferably at least about 80%, even more preferably at least about 85% or 90% identical to each other remain hybridized to each other. Such stringent conditions are known to those skilled in the art and can be found in Current Protocols in Molecular Biology, Ausubel et al., eds., John Wiley & Sons, Inc. (1995), sections 2, 4, and 6. Additional stringent conditions can be found in Molecular Cloning: A Laboratory Manual, Sambrook et al., Cold Spring Harbor Press, Cold Spring Harbor, N.Y. (1989), chapters 7, 9, and 11. A preferred, non-limiting example of stringent hybridization conditions includes hybridization in 4×sodium chloride/sodium citrate (SSC), at about 65-70° C. (or alternatively hybridization in 4×SSC plus 50% formamide at about 42-50° C.) followed by one or more washes in 1×SSC, at about 65-70° C. A preferred, non-limiting example of highly stringent hybridization conditions includes hybridization in 1×SSC, at about 65-70° C. (or alternatively hybridization in 1×SSC plus 50% formamide at about 42-50° C.) followed by one or more washes in 0.3×SSC, at about 65-70° C. A preferred, non-limiting example of reduced stringency hybridization conditions includes hybridization in 4×SSC, at about 50-60° C. (or alternatively hybridization in 6×SSC plus 50% formamide at about 40-45° C.) followed by one or more washes in 2×SSC, at about 50-60° C. Ranges intermediate to the above-recited values, e.g., at 65-70° C. or at 42-50° C. are also intended to be encompassed by the present invention. SSPE (1×SSPE is 0.15M NaCl, 10 mM NaH₂PO₄, and 1.25 mM EDTA, pH 7.4) can be substituted for SSC (1×SSC is 0.15M NaCl and 15 mM sodium citrate) in the hybridization and wash buffers; washes are performed for 15 minutes each after hybridization is complete. The hybridization temperature for hybrids anticipated to be less than 50 base pairs in length should be 5-10° C. less than the melting temperature (Tₘ) of the hybrid, where Tₘ is determined according to the following equations. For hybrids less than 18 base pairs in length, Tₘ(° C.)=2(# of A+T bases)+4(# of G+C bases). For hybrids between 18 and 49 base pairs in length, Tₘ(° C.)=81.5+16.6(log₁₀[Na⁺])+0.41(% G+C)−(600/N), where N is the number of bases in the hybrid, and [Na⁺] is the concentration of sodium ions in the hybridization buffer ([Na⁺] for 1×SSC=0.165 M). It will also be recognized by the skilled practitioner that additional reagents may be added to hybridization and/or wash buffers to decrease non-specific hybridization of nucleic acid molecules to membranes, for example, nitrocellulose or nylon membranes, including but not limited to blocking agents (e.g., BSA or salmon or herring sperm carrier DNA), detergents (e.g., SDS), chelating agents (e.g., EDTA), Ficoll, PVP and the like. When using nylon membranes, in particular, an additional preferred, non-limiting example of stringent hybridization conditions is hybridization in 0.25-0.5M NaH₂PO₄, 7% SDS at about 65° C., followed by one or more washes at 0.02M NaH₂PO₄, 1% SDS at 65° C. (see e.g., Church and Gilbert (1984) Proc. Natl. Acad. Sci. USA 81:1991-1995), or alternatively 0.2×SSC, 1% SDS.

[1311] Preferably, an isolated nucleic acid molecule of the invention that hybridizes under stringent conditions to the sequence of SEQ ID NO:31 or 33, and corresponds to a naturally-occurring nucleic acid molecule. As used herein, a “naturally-occurring” nucleic acid molecule refers to an RNA or DNA molecule having a nucleotide sequence that occurs in nature (e.g., encodes a natural protein).

[1312] In addition to naturally-occurring allelic variants of the IC47611 sequences that may exist in the population, the skilled artisan will further appreciate that changes can be introduced by mutation into the nucleotide sequences of SEQ ID NO:31 or 33, or the nucleotide sequence of the DNA insert of the plasmid deposited with ATCC as Accession Number ______, thereby leading to changes in the amino acid sequence of the encoded IC47611 proteins, without altering the functional ability of the IC47611 proteins. For example, nucleotide substitutions leading to amino acid substitutions at “non-essential” amino acid residues can be made in the sequence of SEQ ID NO:31 or 33, or the nucleotide sequence of the DNA insert of the plasmid deposited with ATCC as Accession Number ______. A “non-essential” amino acid residue is a residue that can be altered from the wild-type sequence of IC47611 (e.g., the sequence of SEQ ID NO:32) without altering the biological activity, whereas an “essential” amino acid residue is required for biological activity. For example, amino acid residues that are conserved among the IC47611 proteins of the present invention, e.g., those present in a transmembrane domain, are predicted to be particularly unamenable to alteration. Furthermore, additional amino acid residues that are conserved between the IC47611 proteins of the present invention and other members of the IC47611 family are not likely to be amenable to alteration.

[1313] Accordingly, another aspect of the invention pertains to nucleic acid molecules encoding IC47611 proteins that contain changes in amino acid residues that are not essential for activity. Such IC47611 proteins differ in amino acid sequence from SEQ ID NO:32, yet retain biological activity. In one embodiment, the isolated nucleic acid molecule comprises a nucleotide sequence encoding a protein, wherein the protein comprises an amino acid sequence at least about 50%, 55%, 60%, 65%, 70%, 75%, 80%, 85%, 90%, 95%, 96%, 97%, 98%, 99%, 99.1%, 99.2%, 99.3%, 99.4%, 99.5%, 99.6%, 99.7%, 99.8%, 99.9% or more identical to SEQ ID NO:32.

[1314] An isolated nucleic acid molecule encoding an IC47611 protein identical to the protein of SEQ ID NO:32, can be created by introducing one or more nucleotide substitutions, additions or deletions into the nucleotide sequence of SEQ ID NO:31 or 33, or the nucleotide sequence of the DNA insert of the plasmid deposited with ATCC as Accession Number ______, such that one or more amino acid substitutions, additions or deletions are introduced into the encoded protein. Mutations can be introduced into SEQ ID NO:31 or 33, or the nucleotide sequence of the DNA insert of the plasmid deposited with ATCC as Accession Number ______ by standard techniques, such as site-directed mutagenesis and PCR-mediated mutagenesis. Preferably, conservative amino acid substitutions are made at one or more predicted non-essential amino acid residues. A “conservative amino acid substitution” is one in which the amino acid residue is replaced with an amino acid residue having a similar side chain. Families of amino acid residues having similar side chains have been defined in the art. These families include amino acids with basic side chains (e.g., lysine, arginine, histidine), acidic side chains (e.g., aspartic acid, glutamic acid), uncharged polar side chains (e.g., glycine, asparagine, glutamine, serine, threonine, tyrosine, cysteine), nonpolar side chains (e.g., alanine, valine, leucine, isoleucine, proline, phenylalanine, methionine, tryptophan), beta-branched side chains (e.g., threonine, valine, isoleucine) and aromatic side chains (e.g., tyrosine, phenylalanine, tryptophan, histidine). Thus, a predicted nonessential amino acid residue in an IC47611 protein is preferably replaced with another amino acid residue from the same side chain family. Alternatively, in another embodiment, mutations can be introduced randomly along all or part of an IC47611 coding sequence, such as by saturation mutagenesis, and the resultant mutants can be screened for IC47611 biological activity to identify mutants that retain activity. Following mutagenesis of SEQ ID NO:31 or 33, or the nucleotide sequence of the DNA insert of the plasmid deposited with ATCC as Accession Number ______, the encoded protein can be expressed recombinantly and the activity of the protein can be determined.

[1315] In a preferred embodiment, a mutant IC47611 protein can be assayed for the ability to (1) modulate membrane excitability, (2) regulate intracellular ion concentration, (3) modulate membrane polarization (e.g., membrane polarization and/or depolarization), (4) regulate action potential, (5) regulate cellular signal transduction, (6) regulate neurotransmitter release (e.g., from neuronal cells), (7) modulate synaptic transmission, (8) regulate neuronal excitability and/or plasticity, (9) regulate muscle contraction, (10) regulate cell activation and (11) regulate cellular proliferation, growth, migration and/or differentiation.

[1316] In addition to the nucleic acid molecules encoding IC47611 proteins described above, another aspect of the invention pertains to isolated nucleic acid molecules which are antisense thereto. An “antisense” nucleic acid comprises a nucleotide sequence which is complementary to a “sense” nucleic acid encoding a protein, e.g., complementary to the coding strand of a double-stranded cDNA molecule or complementary to an mRNA sequence. Accordingly, an antisense nucleic acid can hydrogen bond to a sense nucleic acid. The antisense nucleic acid can be complementary to an entire IC47611 coding strand, or to only a portion thereof. In one embodiment, an antisense nucleic acid molecule is antisense to a “coding region” of the coding strand of a nucleotide sequence encoding IC47611. The term “coding region” refers to the region of the nucleotide sequence comprising codons which are translated into amino acid residues (e.g., the coding region of human IC47611 corresponds to SEQ ID NO:33). In another embodiment, the antisense nucleic acid molecule is antisense to a “noncoding region” of the coding strand of a nucleotide sequence encoding IC47611. The term “noncoding region” refers to 5′ and 3′ sequences which flank the coding region that are not translated into amino acids (i.e., also referred to as 5′ and 3′ untranslated regions).

[1317] Given the coding strand sequences encoding IC47611 disclosed herein (e.g., SEQ ID NO:33), antisense nucleic acids of the invention can be designed according to the rules of Watson and Crick base pairing. The antisense nucleic acid molecule can be complementary to the entire coding region of IC47611 mRNA, but more preferably is an oligonucleotide which is antisense to only a portion of the coding or noncoding region of IC47611 mRNA. For example, the antisense oligonucleotide can be complementary to the region surrounding the translation start site of IC47611 mRNA. An antisense oligonucleotide can be, for example, about 5, 10, 15, 20, 25, 30, 35, 40, 45 or 50 nucleotides in length. An antisense nucleic acid of the invention can be constructed using chemical synthesis and enzymatic ligation reactions using procedures known in the art. For example, an antisense nucleic acid (e.g., an antisense oligonucleotide) can be chemically synthesized using naturally occurring nucleotides or variously modified nucleotides designed to increase the biological stability of the molecules or to increase the physical stability of the duplex formed between the antisense and sense nucleic acids, e.g., phosphorothioate derivatives and acridine substituted nucleotides can be used. Examples of modified nucleotides which can be used to generate the antisense nucleic acid include 5-fluorouracil, 5-bromouracil, 5-chlorouracil, 5-iodouracil, hypoxanthine, xantine, 4-acetylcytosine, 5-(carboxyhydroxylmethyl) uracil, 5-carboxymethylaminomethyl-2-thiouridine, 5-carboxymethylaminomethyluracil, dihydrouracil, beta-D-galactosylqueosine, inosine, N6-isopentenyladenine, 1-methylguanine, 1-methylinosine, 2,2-dimethylguanine, 2-methyladenine, 2-methylguanine, 3-methylcytosine, 5-methylcytosine, N6-adenine, 7-methylguanine, 5-methylaminomethyluracil, 5-methoxyaminomethyl-2-thiouracil, beta-D-mannosylqueosine, 5′-methoxycarboxymethyluracil, 5-methoxyuracil, 2-methylthio-N6-isopentenyladenine, uracil-5-oxyacetic acid (v), wybutoxosine, pseudouracil, queosine, 2-thiocytosine, 5-methyl-2-thiouracil, 2-thiouracil, 4-uracil-5-oxyacetic acid (v), 5-methyl-2-thiouracil, 3-(3-amino-3-N-2-carboxypropyl) uracil, (acp3)w, and 2,6-diaminopurine. Alternatively, the antisense nucleic acid can be produced biologically using an expression vector into which a nucleic acid has been subcloned in an antisense orientation (i.e., RNA transcribed from the inserted nucleic acid will be of an antisense orientation to a target nucleic acid of interest, described further in the following subsection).

[1318] The antisense nucleic acid molecules of the invention are typically administered to a subject or generated in situ such that they hybridize with or bind to cellular mRNA and/or genomic DNA encoding an IC47611 protein to thereby inhibit expression of the protein, e.g., by inhibiting transcription and/or translation. The hybridization can be by conventional nucleotide complementarity to form a stable duplex, or, for example, in the case of an antisense nucleic acid molecule which binds to DNA duplexes, through specific interactions in the major groove of the double helix. An example of a route of administration of antisense nucleic acid molecules of the invention includes direct injection at a tissue site. Alternatively, antisense nucleic acid molecules can be modified to target selected cells and then administered systemically. For example, for systemic administration, antisense molecules can be modified such that they specifically bind to receptors or antigens expressed on a selected cell surface, e.g., by linking the antisense nucleic acid molecules to peptides or antibodies which bind to cell surface receptors or antigens. The antisense nucleic acid molecules can also be delivered to cells using the vectors described herein. To achieve sufficient intracellular concentrations of the antisense molecules, vector constructs in which the antisense nucleic acid molecule is placed under the control of a strong pol II or pol III promoter are preferred.

[1319] In yet another embodiment, the antisense nucleic acid molecule of the invention is an α-anomeric nucleic acid molecule. An α-anomeric nucleic acid molecule forms specific double-stranded hybrids with complementary RNA in which, contrary to the usual β-units, the strands run parallel to each other (Gaultier et al. (1987) Nucleic Acids. Res. 15:6625-6641). The antisense nucleic acid molecule can also comprise a 2′-o-methylribonucleotide (Inoue et al. (1987) Nucleic Acids Res. 15:6131-6148) or a chimeric RNA-DNA analogue (Inoue et al. (1987) FEBS Lett. 215:327-330).

[1320] In still another embodiment, an antisense nucleic acid of the invention is a ribozyme. Ribozymes are catalytic RNA molecules with ribonuclease activity which are capable of cleaving a single-stranded nucleic acid, such as an mRNA, to which they have a complementary region. Thus, ribozymes (e.g., hammerhead ribozymes (described in Haseloff and Gerlach (1988) Nature 334:585-591)) can be used to catalytically cleave IC47611 mRNA transcripts to thereby inhibit translation of IC47611 mRNA. A ribozyme having specificity for an IC47611-encoding nucleic acid can be designed based upon the nucleotide sequence of an IC47611 cDNA disclosed herein (i.e., SEQ ID NO:31 or 33, or the nucleotide sequence of the DNA insert of the plasmid deposited with ATCC as Accession Number ______). For example, a derivative of a Tetrahymena L-19 IVS RNA can be constructed in which the nucleotide sequence of the active site is complementary to the nucleotide sequence to be cleaved in an IC47611-encoding mRNA. See, e.g., Cech et al. U.S. Pat. No. 4,987,071; and Cech et al. U.S. Pat. No. 5,116,742. Alternatively, IC47611 mRNA can be used to select a catalytic RNA having a specific ribonuclease activity from a pool of RNA molecules. See, e.g., Bartel, D. and Szostak, J. W. (1993) Science 261:1411-1418.

[1321] Alternatively, IC47611 gene expression can be inhibited by targeting nucleotide sequences complementary to the regulatory region of the IC47611 (e.g., the IC47611 promoter and/or enhancers; e.g., nucleotides 1-366 of SEQ ID NO:31) to form triple helical structures that prevent transcription of the IC47611 gene in target cells. See generally, Helene, C. (1991) Anticancer Drug Des. 6(6):569-84; Helene, C. et al. (1992) Ann. N.Y. Acad. Sci. 660:27-36; and Maher, L. J. (1992) Bioassays 14(12):807-15.

[1322] In yet another embodiment, the IC47611 nucleic acid molecules of the present invention can be modified at the base moiety, sugar moiety or phosphate backbone to improve, e.g., the stability, hybridization, or solubility of the molecule. For example, the deoxyribose phosphate backbone of the nucleic acid molecules can be modified to generate peptide nucleic acids (see Hyrup B. et al. (1996) Bioorganic & Medicinal Chemistry 4 (1): 5-23). As used herein, the terms “peptide nucleic acids” or “PNAs” refer to nucleic acid mimics, e.g., DNA mimics, in which the deoxyribose phosphate backbone is replaced by a pseudopeptide backbone and only the four natural nucleobases are retained. The neutral backbone of PNAs has been shown to allow for specific hybridization to DNA and RNA under conditions of low ionic strength. The synthesis of PNA oligomers can be performed using standard solid phase peptide synthesis protocols as described in Hyrup B. et al. (1996) supra; Perry-O'Keefe et al. Proc. Natl. Acad Sci. 93: 14670-675.

[1323] PNAs of IC47611 nucleic acid molecules can be used in therapeutic and diagnostic applications. For example, PNAs can be used as antisense or antigene agents for sequence-specific modulation of gene expression by, for example, inducing transcription or translation arrest or inhibiting replication. PNAs of IC47611 nucleic acid molecules can also be used in the analysis of single base pair mutations in a gene, (e.g., by PNA-directed PCR clamping); as ‘artificial restriction enzymes’ when used in combination with other enzymes, (e.g., S1 nucleases (Hyrup B. (1996) supra)); or as probes or primers for DNA sequencing or hybridization (Hyrup B. et al. (1996) supra; Perry-O'Keefe supra).

[1324] In another embodiment, PNAs of IC47611 can be modified, (e.g., to enhance their stability or cellular uptake), by attaching lipophilic or other helper groups to PNA, by the formation of PNA-DNA chimeras, or by the use of liposomes or other techniques of drug delivery known in the art. For example, PNA-DNA chimeras of IC47611 nucleic acid molecules can be generated which may combine the advantageous properties of PNA and DNA. Such chimeras allow DNA recognition enzymes, (e.g., RNAse H and DNA polymerases), to interact with the DNA portion while the PNA portion would provide high binding affinity and specificity. PNA-DNA chimeras can be linked using linkers of appropriate lengths selected in terms of base stacking, number of bonds between the nucleobases, and orientation (Hyrup B. (1996) supra). The synthesis of PNA-DNA chimeras can be performed as described in Hyrup B. (1996) supra and Finn P. J. et al. (1996) Nucleic Acids Res. 24 (17): 3357-63. For example, a DNA chain can be synthesized on a solid support using standard phosphoramidite coupling chemistry and modified nucleoside analogs, e.g., 5′-(4-methoxytrityl)amino-5′-deoxy-thymidine phosphoramidite, can be used as a between the PNA and the 5′ end of DNA (Mag, M. et al. (1989) Nucleic Acid Res. 17: 5973-88). PNA monomers are then coupled in a stepwise manner to produce a chimeric molecule with a 5′ PNA segment and a 3′ DNA segment (Finn P. J. et al. (1996) supra). Alternatively, chimeric molecules can be synthesized with a 5′ DNA segment and a 3′ PNA segment (Peterser, K. H. et al. (1975) Bioorganic Med. Chem. Lett. 5: 1119-11124).

[1325] In other embodiments, the oligonucleotide may include other appended groups such as peptides (e.g., for targeting host cell receptors in vivo), or agents facilitating transport across the cell membrane (see, e.g., Letsinger et al. (1989) Proc. Natl. Acad. Sci. USA 86:6553-6556; Lemaitre et al. (1987) Proc. Natl. Acad. Sci. USA 84:648-652; PCT Publication No. W088/09810) or the blood-brain barrier (see, e.g., PCT Publication No. W089/10134). In addition, oligonucleotides can be modified with hybridization-triggered cleavage agents (See, e.g., Krol et al. (1988) Bio-Techniques 6:958-976) or intercalating agents. (See, e.g., Zon (1988) Pharm. Res. 5:539-549). To this end, the oligonucleotide may be conjugated to another molecule, (e.g., a peptide, hybridization triggered cross-linking agent, transport agent, or hybridization-triggered cleavage agent).

[1326] Alternatively, the expression characteristics of an endogenous IC47611 gene within a cell line or microorganism may be modified by inserting a heterologous DNA regulatory element into the genome of a stable cell line or cloned microorganism such that the inserted regulatory element is operatively linked with the endogenous IC47611 gene. For example, an endogenous IC47611 gene which is normally “transcriptionally silent”, i.e., an IC47611 gene which is normally not expressed, or is expressed only at very low levels in a cell line or microorganism, may be activated by inserting a regulatory element which is capable of promoting the expression of a normally expressed gene product in that cell line or microorganism. Alternatively, a transcriptionally silent, endogenous IC47611 gene may be activated by insertion of a promiscuous regulatory element that works across cell types.

[1327] A heterologous regulatory element may be inserted into a stable cell line or cloned microorganism, such that it is operatively linked with an endogenous IC47611 gene, using techniques, such as targeted homologous recombination, which are well known to those of skill in the art, and described, e.g., in Chappel, U.S. Pat. No. 5,272,071; PCT publication No. WO 91/06667, published May 16, 1991.

[1328] II. Isolated IC47611 Proteins and Anti-IC47611 Antibodies

[1329] One aspect of the invention pertains to isolated IC47611 proteins, and biologically active portions thereof, as well as polypeptide fragments suitable for use as immunogens to raise anti-IC47611 antibodies. In one embodiment, native IC47611 proteins can be isolated from cells or tissue sources by an appropriate purification scheme using standard protein purification techniques. In another embodiment, IC47611 proteins are produced by recombinant DNA techniques. Alternative to recombinant expression, an IC47611 protein or polypeptide can be synthesized chemically using standard peptide synthesis techniques.

[1330] An “isolated” or “purified” protein or biologically active portion thereof is substantially free of cellular material or other contaminating proteins from the cell or tissue source from which the IC47611 protein is derived, or substantially free from chemical precursors or other chemicals when chemically synthesized. The language “substantially free of cellular material” includes preparations of IC47611 protein in which the protein is separated from cellular components of the cells from which it is isolated or recombinantly produced. In one embodiment, the language “substantially free of cellular material” includes preparations of IC47611 protein having less than about 30% (by dry weight) of non-IC47611 protein (also referred to herein as a “contaminating protein”), more preferably less than about 20% of non-IC47611 protein, still more preferably less than about 10% of non-IC47611 protein, and most preferably less than about 5% non-IC47611 protein. When the IC47611 protein or biologically active portion thereof is recombinantly produced, it is also preferably substantially free of culture medium, i.e., culture medium represents less than about 20%, more preferably less than about 10%, and most preferably less than about 5% of the volume of the protein preparation.

[1331] The language “substantially free of chemical precursors or other chemicals” includes preparations of IC47611 protein in which the protein is separated from chemical precursors or other chemicals which are involved in the synthesis of the protein. In one embodiment, the language “substantially free of chemical precursors or other chemicals” includes preparations of IC47611 protein having less than about 30% (by dry weight) of chemical precursors or non-IC47611 chemicals, more preferably less than about 20% chemical precursors or non-IC47611 chemicals, still more preferably less than about 10% chemical precursors or non-IC47611 chemicals, and most preferably less than about 5% chemical precursors or non-IC47611 chemicals.

[1332] As used herein, a “biologically active portion” of an IC47611 protein includes a fragment of an IC47611 protein which participates in an interaction between an IC47611 molecule and a non-IC47611 molecule. Biologically active portions of an IC47611 protein include peptides comprising amino acid sequences sufficiently identical to or derived from the amino acid sequence of the IC47611 protein, e.g., the amino acid sequence shown in SEQ ID NO:32, which include less amino acids than the full length IC47611 proteins, and exhibit at least one activity of an IC47611 protein. Typically, biologically active portions comprise a domain or motif with at least one activity of the IC47611 protein, e.g., modulating membrane excitability. A biologically active portion of an IC47611 protein can be a polypeptide which is, for example, 25, 50, 75, 100, 125, 150, 175, 200 or more amino acids in length. Biologically active portions of an IC47611 protein can be used as targets for developing agents which modulate an IC47611 mediated activity, e.g., modulation of membrane excitability.

[1333] In one embodiment, a biologically active portion of an IC47611 protein comprises at least one transmembrane domain. It is to be understood that a preferred biologically active portion of an IC47611 protein of the present invention may contain one or more of the following domains: a transmembrane domain, an inward-rectifier potassium channel (IRK) domain, and an inward-rectifier potassium channel (IRK)-related domain. Moreover, other biologically active portions, in which other regions of the protein are deleted, can be prepared by recombinant techniques and evaluated for one or more of the functional activities of a native IC47611 protein.

[1334] In a preferred embodiment, the IC47611 protein has an amino acid sequence shown in SEQ ID NO:32. In other embodiments, the IC47611 protein is substantially identical to SEQ ID NO:32, and retains the functional activity of the protein of SEQ ID NO:32, yet differs in amino acid sequence due to natural allelic variation or mutagenesis, as described in detail in subsection I above. Accordingly, in another embodiment, the IC47611 protein is a protein which comprises an amino acid sequence at least about 50%, 55%, 60%, 65%, 70%, 75%, 80%, 85%, 90%, 95%, 96%, 97%, 98%, 99%, 99.1%, 99.2%, 99.3%, 99.4%, 99.5%, 99.6%, 99.7%, 99.8%, 99.9% or more identical to SEQ ID NO:32.

[1335] To determine the percent identity of two amino acid sequences or of two nucleic acid sequences, the sequences are aligned for optimal comparison purposes (e.g., gaps can be introduced in one or both of a first and a second amino acid or nucleic acid sequence for optimal alignment and non-identical sequences can be disregarded for comparison purposes). In a preferred embodiment, the length of a reference sequence aligned for comparison purposes is at least 30%, preferably at least 40%, more preferably at least 50%, even more preferably at least 60%, and even more preferably at least 70%, 80%, or 90% of the length of the reference sequence (e.g., when aligning a second sequence to the IC47611 amino acid sequence of SEQ ID NO:32 having 453 amino acid residues, at least 136, preferably at least 181, more preferably at least 227, even more preferably at least 272, and even more preferably at least 317, 362, 408 or more amino acid residues are aligned). The amino acid residues or nucleotides at corresponding amino acid positions or nucleotide positions are then compared. When a position in the first sequence is occupied by the same amino acid residue or nucleotide as the corresponding position in the second sequence, then the molecules are identical at that position (as used herein amino acid or nucleic acid “identity” is equivalent to amino acid or nucleic acid “homology”). The percent identity between the two sequences is a function of the number of identical positions shared by the sequences, taking into account the number of gaps, and the length of each gap, which need to be introduced for optimal alignment of the two sequences.

[1336] The comparison of sequences and determination of percent identity between two sequences can be accomplished using a mathematical algorithm. In a preferred embodiment, the percent identity between two amino acid sequences is determined using the Needleman and Wunsch (J. Mol. Biol. (48):444-453 (1970)) algorithm which has been incorporated into the GAP program in the GCG software package (available at http://www.gcg.com), using either a Blosum 62 matrix or a PAM250 matrix, and a gap weight of 16, 14, 12, 10, 8, 6, or 4 and a length weight of 1, 2, 3, 4, 5, or 6. In yet another preferred embodiment, the percent identity between two nucleotide sequences is determined using the GAP program in the GCG software package (available at http://www.gcg.com), using a NWSgapdna.CMP matrix and a gap weight of 40, 50, 60, 70, or 80 and a length weight of 1, 2, 3, 4, 5, or 6. In another embodiment, the percent identity between two amino acid or nucleotide sequences is determined using the algorithm of E. Meyers and W. Miller (Comput. Appl. Biosci., 4: 11-17 (1988)) which has been incorporated into the ALIGN program (version 2.0), using a PAM120 weight residue table, a gap length penalty of 12 and a gap penalty of 4.

[1337] The nucleic acid and protein sequences of the present invention can further be used as a “query sequence” to perform a search against public databases to, for example, identify other family members or related sequences. Such searches can be performed using the NBLAST and XBLAST programs (version 2.0) of Altschul, et al. (1990) J. Mol. Biol. 215:403-10. BLAST nucleotide searches can be performed with the NBLAST program, score=100, wordlength=12 to obtain nucleotide sequences homologous to IC47611 nucleic acid molecules of the invention. BLAST protein searches can be performed with the XBLAST program, score=100, wordlength=3 to obtain amino acid sequences homologous to IC47611 protein molecules of the invention. To obtain gapped alignments for comparison purposes, Gapped BLAST can be utilized as described in Altschul et al., (1997) Nucleic Acids Res. 25(17): 3389-3402. When utilizing BLAST and Gapped BLAST programs, the default parameters of the respective programs (e.g., XBLAST and NBLAST) can be used. See http://www.ncbi.nlm.nih.gov.

[1338] The invention also provides IC47611 chimeric or fusion proteins. As used herein, an IC47611 “chimeric protein” or “fusion protein” comprises an IC47611 polypeptide operatively linked to a non-IC47611 polypeptide. An “IC47611 polypeptide” refers to a polypeptide having an amino acid sequence corresponding to IC47611, whereas a “non-IC47611 polypeptide” refers to a polypeptide having an amino acid sequence corresponding to a protein which is not substantially homologous to the IC47611 protein, e.g., a protein which is different from the IC47611 protein and which is derived from the same or a different organism. Within an IC47611 fusion protein the IC47611 polypeptide can correspond to all or a portion of an IC47611 protein. In a preferred embodiment, an IC47611 fusion protein comprises at least one biologically active portion of an IC47611 protein. In another preferred embodiment, an IC47611 fusion protein comprises at least two biologically active portions of an IC47611 protein. Within the fusion protein, the term “operatively linked” is intended to indicate that the IC47611 polypeptide and the non-IC47611 polypeptide are fused in-frame to each other. The non-IC47611 polypeptide can be fused to the N-terminus or C-terminus of the IC47611 polypeptide.

[1339] For example, in one embodiment, the fusion protein is a GST-IC47611 fusion protein in which the IC47611 sequences are fused to the C-terminus of the GST sequences. Such fusion proteins can facilitate the purification of recombinant IC47611.

[1340] In another embodiment, the fusion protein is an IC47611 protein containing a heterologous signal sequence at its N-terminus. In certain host cells (e.g., mammalian host cells), expression and/or secretion of IC47611 can be increased through use of a beterologous signal sequence.

[1341] The IC47611 fusion proteins of the invention can be incorporated into pharmaceutical compositions and administered to a subject in vivo. The IC47611 fusion proteins can be used to affect the bioavailability of an IC47611 substrate. Use of IC47611 fusion proteins may be useful therapeutically for the treatment of disorders caused by, for example, (i) aberrant modification or mutation of a gene encoding an IC47611 protein; (ii) mis-regulation of the IC47611 gene; and (iii) aberrant post-translational modification of an IC47611 protein.

[1342] Moreover, the IC47611-fusion proteins of the invention can be used as immunogens to produce anti-IC47611 antibodies in a subject, to purify IC47611 ligands and in screening assays to identify molecules which inhibit the interaction of IC47611 with an IC47611 substrate.

[1343] Preferably, an IC47611 chimeric or fusion protein of the invention is produced by standard recombinant DNA techniques. For example, DNA fragments coding for the different polypeptide sequences are ligated together in-frame in accordance with conventional techniques, for example by employing blunt-ended or stagger-ended termini for ligation, restriction enzyme digestion to provide for appropriate termini, filling-in of cohesive ends as appropriate, alkaline phosphatase treatment to avoid undesirable joining, and enzymatic ligation. In another embodiment, the fusion gene can be synthesized by conventional techniques including automated DNA synthesizers. Alternatively, PCR amplification of gene fragments can be carried out using anchor primers which give rise to complementary overhangs between two consecutive gene fragments which can subsequently be annealed and reamplified to generate a chimeric gene sequence (see, for example, Current Protocols in Molecular Biology, eds. Ausubel et al. John Wiley & Sons: 1992). Moreover, many expression vectors are commercially available that already encode a fusion moiety (e.g., a GST polypeptide). An IC47611-encoding nucleic acid can be cloned into such an expression vector such that the fusion moiety is linked in-frame to the IC47611 protein.

[1344] The present invention also pertains to variants of the IC47611 proteins which function as either IC47611 agonists (mimetics) or as IC47611 antagonists. Variants of the IC47611 proteins can be generated by mutagenesis, e.g., discrete point mutation or truncation of an IC47611 protein. An agonist of the IC47611 proteins can retain substantially the same, or a subset, of the biological activities of the naturally occurring form of an IC47611 protein. An antagonist of an IC47611 protein can inhibit one or more of the activities of the naturally occurring form of the IC47611 protein by, for example, competitively modulating an IC47611-mediated activity of an IC47611 protein. Thus, specific biological effects can be elicited by treatment with a variant of limited function. In one embodiment, treatment of a subject with a variant having a subset of the biological activities of the naturally occurring form of the protein has fewer side effects in a subject relative to treatment with the naturally occurring form of the IC47611 protein.

[1345] In one embodiment, variants of an IC47611 protein which function as either IC47611 agonists (mimetics) or as IC47611 antagonists can be identified by screening combinatorial libraries of mutants, e.g., truncation mutants, of an IC47611 protein for IC47611 protein agonist or antagonist activity. In one embodiment, a variegated library of IC47611 variants is generated by combinatorial mutagenesis at the nucleic acid level and is encoded by a variegated gene library. A variegated library of IC47611 variants can be produced by, for example, enzymatically ligating a mixture of synthetic oligonucleotides into gene sequences such that a degenerate set of potential IC47611 sequences is expressible as individual polypeptides, or alternatively, as a set of larger fusion proteins (e.g., for phage display) containing the set of IC47611 sequences therein. There are a variety of methods that can be used to produce libraries of potential IC47611 variants from a degenerate oligonucleotide sequence. Chemical synthesis of a degenerate gene sequence can be performed in an automatic DNA synthesizer, and the synthetic gene then ligated into an appropriate expression vector. Use of a degenerate set of genes allows for the provision, in one mixture, of all of the sequences encoding the desired set of potential IC47611 sequences. Methods for synthesizing degenerate oligonucleotides are known in the art (see, e.g., Narang, S. A. (1983) Tetrahedron 39:3; Itakura et al. (1984) Annu. Rev. Biochem. 53:323; Itakura et al. (1984) Science 198:1056; Ike et al. (1983) Nucleic Acid Res. 11:477.

[1346] In addition, libraries of fragments of an IC47611 protein coding sequence can be used to generate a variegated population of IC47611 fragments for screening and subsequent selection of variants of an IC47611 protein. In one embodiment, a library of coding sequence fragments can be generated by treating a double stranded PCR fragment of an IC47611 coding sequence with a nuclease under conditions wherein nicking occurs only about once per molecule, denaturing the double stranded DNA, renaturing the DNA to form double stranded DNA which can include sense/antisense pairs from different nicked products, removing single stranded portions from reformed duplexes by treatment with S1 nuclease, and ligating the resulting fragment library into an expression vector. By this method, an expression library can be derived which encodes N-terminal, C-terminal and internal fragments of various sizes of the IC47611 protein.

[1347] Several techniques are known in the art for screening gene products of combinatorial libraries made by point mutations or truncation, and for screening cDNA libraries for gene products having a selected property. Such techniques are adaptable for rapid screening of the gene libraries generated by the combinatorial mutagenesis of IC47611 proteins. The most widely used techniques, which are amenable to high through-put analysis, for screening large gene libraries typically include cloning the gene library into replicable expression vectors, transforming appropriate cells with the resulting library of vectors, and expressing the combinatorial genes under conditions in which detection of a desired activity facilitates isolation of the vector encoding the gene whose product was detected. Recursive ensemble mutagenesis (REM), a new technique which enhances the frequency of functional mutants in the libraries, can be used in combination with the screening assays to identify IC47611 variants (Arkin and Youvan (1992) Proc. Natl. Acad. Sci. USA 89:7811-7815; Delagrave et al. (1993) Protein Engineering 6(3): 327-331).

[1348] In one embodiment, cell based assays can be exploited to analyze a variegated IC47611 library. For example, a library of expression vectors can be transfected into a cell line, e.g., a neuronal cell line, which ordinarily responds to an IC47611 ligand in a particular IC47611 ligand-dependent manner. The transfected cells are then contacted with an IC47611 ligand and the effect of expression of the mutant on, e.g., membrane excitability of IC47611 can be detected. Plasmid DNA can then be recovered from the cells which score for inhibition, or alternatively, potentiation of signaling by the IC47611 ligand, and the individual clones further characterized.

[1349] An isolated IC47611 protein, or a portion or fragment thereof, can be used as an immunogen to generate antibodies that bind IC47611 using standard techniques for polyclonal and monoclonal antibody preparation. A full-length IC47611 protein can be used or, alternatively, the invention provides antigenic peptide fragments of IC47611 for use as immunogens. The antigenic peptide of IC47611 comprises at least 8 amino acid residues of the amino acid sequence shown in SEQ ID NO:32 and encompasses an epitope of IC47611 such that an antibody raised against the peptide forms a specific immune complex with IC47611. Preferably, the antigenic peptide comprises at least 10 amino acid residues, more preferably at least 15 amino acid residues, even more preferably at least 20 amino acid residues, and most preferably at least 30 amino acid residues.

[1350] Preferred epitopes encompassed by the antigenic peptide are regions of IC47611 that are located on the surface of the protein, e.g., hydrophilic regions, as well as regions with high antigenicity (see FIG. 25).

[1351] An IC47611 immunogen typically is used to prepare antibodies by immunizing a suitable subject, (e.g., rabbit, goat, mouse or other mammal) with the immunogen. An appropriate immunogenic preparation can contain, for example, recombinantly expressed IC47611 protein or a chemically synthesized IC47611 polypeptide. The preparation can further include an adjuvant, such as Freund's complete or incomplete adjuvant, or similar immunostimulatory agent. Immunization of a suitable subject with an immunogenic IC47611 preparation induces a polyclonal anti-IC47611 antibody response.

[1352] Accordingly, another aspect of the invention pertains to anti-IC47611 antibodies. The term “antibody” as used herein refers to immunoglobulin molecules and immunologically active portions of immunoglobulin molecules, i.e., molecules that contain an antigen binding site which specifically binds (immunoreacts with) an antigen, such as IC47611. Examples of immunologically active portions of immunoglobulin molecules include F(ab) and F(ab′)₂ fragments which can be generated by treating the antibody with an enzyme such as pepsin. The invention provides polyclonal and monoclonal antibodies that bind IC47611. The term “monoclonal antibody” or “monoclonal antibody composition”, as used herein, refers to a population of antibody molecules that contain only one species of an antigen binding site capable of immunoreacting with a particular epitope of IC47611. A monoclonal antibody composition thus typically displays a single binding affinity for a particular IC47611 protein with which it immunoreacts.

[1353] Polyclonal anti-IC47611 antibodies can be prepared as described above by immunizing a suitable subject with an IC47611 immunogen. The anti-IC47611 antibody titer in the immunized subject can be monitored over time by standard techniques, such as with an enzyme linked immunosorbent assay (ELISA) using immobilized IC47611. If desired, the antibody molecules directed against IC47611 can be isolated from the mammal (e.g., from the blood) and further purified by well known techniques, such as protein A chromatography to obtain the IgG fraction. At an appropriate time after immunization, e.g., when the anti-IC47611 antibody titers are highest, antibody-producing cells can be obtained from the subject and used to prepare monoclonal antibodies by standard techniques, such as the hybridoma technique originally described by Kohler and Milstein (1975) Nature 256:495-497) (see also, Brown et al. (1981) J. Immunol. 127:539-46; Brown et al. (1980) J. Biol. Chem. 255:4980-83; Yeh et al. (1976) Proc. Natl. Acad. Sci. USA 76:2927-31; and Yeh et al. (1982) Int. J. Cancer 29:269-75), the more recent human B cell hybridoma technique (Kozbor et al. (1983) Immunol Today 4:72), the EBV-hybridoma technique (Cole et al. (1985), Monoclonal Antibodies and Cancer Therapy, Alan R. Liss, Inc., pp. 77-96) or trioma techniques. The technology for producing monoclonal antibody hybridomas is well known (see generally R. H. Kenneth, in Monoclonal Antibodies: A New Dimension In Biological Analyses, Plenum Publishing Corp., New York, N. Y. (1980); E. A. Lerner (1981) Yale J. Biol. Med., 54:387-402; M. L. Gefter et al. (1977) Somatic Cell Genet. 3:231-36). Briefly, an immortal cell line (typically a myeloma) is fused to lymphocytes (typically splenocytes) from a mammal immunized with an IC47611 immunogen as described above, and the culture supernatants of the resulting hybridoma cells are screened to identify a hybridoma producing a monoclonal antibody that binds IC47611.

[1354] Any of the many well known protocols used for fusing lymphocytes and immortalized cell lines can be applied for the purpose of generating an anti-IC47611 monoclonal antibody (see, e.g., G. Galfre et al. (1977) Nature 266:55052; Gefter et al. Somatic Cell Genet., cited supra; Lerner, Yale J. Biol. Med., cited supra; Kenneth, Monoclonal Antibodies, cited supra). Moreover, the ordinarily skilled worker will appreciate that there are many variations of such methods which also would be useful. Typically, the immortal cell line (e.g., a myeloma cell line) is derived from the same mammalian species as the lymphocytes. For example, murine hybridomas can be made by fusing lymphocytes from a mouse immunized with an immunogenic preparation of the present invention with an immortalized mouse cell line. Preferred immortal cell lines are mouse myeloma cell lines that are sensitive to culture medium containing hypoxanthine, aminopterin and thymidine (“HAT medium”). Any of a number of myeloma cell lines can be used as a fusion partner according to standard techniques, e.g., the P3-NS1/1-Ag4-1, P3-x63-Ag8.653 or Sp2/O-Ag14 myeloma lines. These myeloma lines are available from ATCC. Typically, HAT-sensitive mouse myeloma cells are fused to mouse splenocytes using polyethylene glycol (“PEG”). Hybridoma cells resulting from the fusion are then selected using HAT medium, which kills unfused and unproductively fused myeloma cells (unfused splenocytes die after several days because they are not transformed). Hybridoma cells producing a monoclonal antibody of the invention are detected by screening the hybridoma culture supernatants for antibodies that bind IC47611, e.g., using a standard ELISA assay.

[1355] Alternative to preparing monoclonal antibody-secreting hybridomas, a monoclonal anti-IC47611 antibody can be identified and isolated by screening a recombinant combinatorial immunoglobulin library (e.g., an antibody phage display library) with IC47611 to thereby isolate immunoglobulin library members that bind IC47611. Kits for generating and screening phage display libraries are commercially available (e.g., the Pharmacia Recombinant Phage Antibody System, Catalog No. 27-9400-01; and the Stratagene SurfZAP™ Phage Display Kit, Catalog No. 240612). Additionally, examples of methods and reagents particularly amenable for use in generating and screening antibody display library can be found in, for example, Ladner et al. U.S. Pat. No. 5,223,409; Kang et al. PCT International Publication No. WO 92/18619; Dower et al. PCT International Publication No. WO 91/17271; Winter et al. PCT International Publication WO 92/20791; Markland et al. PCT International Publication No. WO 92/15679; Breitling et al. PCT International Publication WO 93/01288; McCafferty et al. PCT International Publication No. WO 92/01047; Garrard et al. PCT International Publication No. WO 92/09690; Ladner et al. PCT International Publication No. WO 90/02809; Fuchs et al. (1991) Bio/Technology 9:1370-1372; Hay et al. (1992) Hum. Antibod. Hybridomas 3:81-85; Huse et al. (1989) Science 246:1275-1281; Griffiths et al. (1993) EMBO J 12:725-734; Hawkins et al. (1992) J. Mol. Biol. 226:889-896; Clackson et al. (1991) Nature 352:624-628; Gram et al. (1992) Proc. Natl. Acad. Sci. USA 89:3576-3580; Garrard et al. (1991) Bio/Technology 9:1373-1377; Hoogenboom et al. (1991) Nuc. Acid Res. 19:4133-4137; Barbas et al. (1991) Proc. Natl. Acad. Sci. USA 88:7978-7982; and McCafferty et al. Nature (1990) 348:552-554.

[1356] Additionally, recombinant anti-IC47611 antibodies, such as chimeric and humanized monoclonal antibodies, comprising both human and non-human portions, which can be made using standard recombinant DNA techniques, are within the scope of the invention. Such chimeric and humanized monoclonal antibodies can be produced by recombinant DNA techniques known in the art, for example using methods described in Robinson et al International Application No. PCT/US86/02269; Akira, et al. European Patent Application 184,187; Taniguchi, M., European Patent Application 171,496; Morrison et al. European Patent Application 173,494; Neuberger et al. PCT International Publication No. WO 86/01533; Cabilly et al. U.S. Pat. No. 4,816,567; Cabilly et al. European Patent Application 125,023; Better et al. (1988) Science 240:1041-1043; Liu et al. (1987) Proc. Natl. Acad. Sci. USA 84:3439-3443; Liu et al. (1987) J. Immunol. 139:3521-3526; Sun et al. (1987) Proc. Natl. Acad. Sci. USA 84:214-218; Nishimura et al. (1987) Canc. Res. 47:999-1005; Wood et al. (1985) Nature 314:446-449; and Shaw et al. (1988) J. Natl. Cancer Inst. 80:1553-1559); Morrison, S. L. (1985) Science 229:1202-1207; Oi et al. (1986) BioTechniques 4:214; Winter U.S. Pat. No. 5,225,539; Jones et al. (1986) Nature 321:552-525; Verhoeyen et al. (1988) Science 239:1534; and Beidler et al. (1988) J. Immunol. 141:4053-4060.

[1357] An anti-IC47611 antibody (e.g., monoclonal antibody) can be used to isolate IC47611 by standard techniques, such as affinity chromatography or immunoprecipitation. An anti-IC47611 antibody can facilitate the purification of natural IC47611 from cells and of recombinantly produced IC47611 expressed in host cells. Moreover, an anti-IC47611 antibody can be used to detect IC47611 protein (e.g., in a cellular lysate or cell supernatant) in order to evaluate the abundance and pattern of expression of the IC47611 protein. Anti-IC47611 antibodies can be used diagnostically to monitor protein levels in tissue as part of a clinical testing procedure, e.g., to, for example, determine the efficacy of a given treatment regimen. Detection can be facilitated by coupling (i.e., physically linking) the antibody to a detectable substance. Examples of detectable substances include various enzymes, prosthetic groups, fluorescent materials, luminescent materials, bioluminescent materials, and radioactive materials. Examples of suitable enzymes include horseradish peroxidase, alkaline phosphatase, β-galactosidase, or acetylcholinesterase; examples of suitable prosthetic group complexes include streptavidin/biotin and avidin/biotin; examples of suitable fluorescent materials include umbelliferone, fluorescein, fluorescein isothiocyanate, rhodamine, dichlorotriazinylamine fluorescein, dansyl chloride or phycoerythrin; an example of a luminescent material includes luminol; examples of bioluminescent materials include luciferase, luciferin, and aequorin, and examples of suitable radioactive material include ¹²⁵I, ¹³¹I, ³⁵S or ³H.

[1358] III. Recombinant Expression Vectors and Host Cells

[1359] Another aspect of the invention pertains to vectors, preferably expression vectors, containing a nucleic acid encoding an IC47611 protein (or a portion thereof). As used herein, the term “vector” refers to a nucleic acid molecule capable of transporting another nucleic acid to which it has been linked. One type of vector is a “plasmid”, which refers to a circular double stranded DNA loop into which additional DNA segments can be ligated. Another type of vector is a viral vector, wherein additional DNA segments can be ligated into the viral genome. Certain vectors are capable of autonomous replication in a host cell into which they are introduced (e.g., bacterial vectors having a bacterial origin of replication and episomal mammalian vectors). Other vectors (e.g., non-episomal mammalian vectors) are integrated into the genome of a host cell upon introduction into the host cell, and thereby are replicated along with the host genome. Moreover, certain vectors are capable of directing the expression of genes to which they are operatively linked. Such vectors are referred to herein as “expression vectors”. In general, expression vectors of utility in recombinant DNA techniques are often in the form of plasmids. In the present specification, “plasmid” and “vector” can be used interchangeably as the plasmid is the most commonly used form of vector. However, the invention is intended to include such other forms of expression vectors, such as viral vectors (e.g., replication defective retroviruses, adenoviruses and adeno-associated viruses), which serve equivalent functions.

[1360] The recombinant expression vectors of the invention comprise a nucleic acid of the invention in a form suitable for expression of the nucleic acid in a host cell, which means that the recombinant expression vectors include one or more regulatory sequences, selected on the basis of the host cells to be used for expression, which is operatively linked to the nucleic acid sequence to be expressed. Within a recombinant expression vector, “operably linked” is intended to mean that the nucleotide sequence of interest is linked to the regulatory sequence(s) in a manner which allows for expression of the nucleotide sequence (e.g., in an in vitro transcription/translation system or in a host cell when the vector is introduced into the host cell). The term “regulatory sequence” is intended to include promoters, enhancers and other expression control elements (e.g., polyadenylation signals). Such regulatory sequences are described, for example, in Goeddel; Gene Expression Technology: Methods in Enzymology 185, Academic Press, San Diego, Calif. (1990). Regulatory sequences include those which direct constitutive expression of a nucleotide sequence in many types of host cells and those which direct expression of the nucleotide sequence only in certain host cells (e.g., tissue-specific regulatory sequences). It will be appreciated by those skilled in the art that the design of the expression vector can depend on such factors as the choice of the host cell to be transformed, the level of expression of protein desired, and the like. The expression vectors of the invention can be introduced into host cells to thereby produce proteins or peptides, including fusion proteins or peptides, encoded by nucleic acids as described herein (e.g., IC47611 proteins, mutant forms of IC47611 proteins, fusion proteins, and the like).

[1361] The recombinant expression vectors of the invention can be designed for expression of IC47611 proteins in prokaryotic or eukaryotic cells. For example, IC47611 proteins can be expressed in bacterial cells such as E. coli, insect cells (using baculovirus expression vectors) yeast cells or mammalian cells. Suitable host cells are discussed further in Goeddel, Gene Expression Technology: Methods in Enzymology 185, Academic Press, San Diego, Calif. (1990). Alternatively, the recombinant expression vector can be transcribed and translated in vitro, for example using T7 promoter regulatory sequences and T7 polymerase.

[1362] Expression of proteins in prokaryotes is most often carried out in E. coli with vectors containing constitutive or inducible promoters directing the expression of either fusion or non-fusion proteins. Fusion vectors add a number of amino acids to a protein encoded therein, usually to the amino terminus of the recombinant protein. Such fusion vectors typically serve three purposes: 1) to increase expression of recombinant protein; 2) to increase the solubility of the recombinant protein; and 3) to aid in the purification of the recombinant protein by acting as a ligand in affinity purification. Often, in fusion expression vectors, a proteolytic cleavage site is introduced at the junction of the fusion moiety and the recombinant protein to enable separation of the recombinant protein from the fusion moiety subsequent to purification of the fusion protein. Such enzymes, and their cognate recognition sequences, include Factor Xa, thrombin and enterokinase. Typical fusion expression vectors include pGEX (Pharmacia Biotech Inc; Smith, D. B. and Johnson, K. S. (1988) Gene 67:31-40), pMAL (New England Biolabs, Beverly, Mass.) and pRIT5 (Pharmacia, Piscataway, N.J.) which fuse glutathione S-transferase (GST), maltose E binding protein, or protein A, respectively, to the target recombinant protein.

[1363] Purified fusion proteins can be utilized in IC47611 activity assays, (e.g., direct assays or competitive assays described in detail below), or to generate antibodies specific for IC47611 proteins, for example. In a preferred embodiment, an IC47611 fusion protein expressed in a retroviral expression vector of the present invention can be utilized to infect bone marrow cells which are subsequently transplanted into irradiated recipients. The pathology of the subject recipient is then examined after sufficient time has passed (e.g., six (6) weeks).

[1364] Examples of suitable inducible non-fusion E. coli expression vectors include pTrc (Amann et al., (1988) Gene 69:301-315) and pET 11d (Studier et al., Gene Expression Technology: Methods in Enzymology 185, Academic Press, San Diego, Calif. (1990) 60-89). Target gene expression from the pTrc vector relies on host RNA polymerase transcription from a hybrid trp-lac fusion promoter. Target gene expression from the pET 11d vector relies on transcription from a T7 gn10-lac fusion promoter mediated by a coexpressed viral RNA polymerase (T7 gn1). This viral polymerase is supplied by host strains BL21(DE3) or HMS174(DE3) from a resident prophage harboring a T7 gn1 gene under the transcriptional control of the lacUV 5 promoter.

[1365] One strategy to maximize recombinant protein expression in E. coli is to express the protein in a host bacteria with an impaired capacity to proteolytically cleave the recombinant protein (Gottesman, S., Gene Expression Technology: Methods in Enzymology 185, Academic Press, San Diego, Calif. (1990) 119-128). Another strategy is to alter the nucleic acid sequence of the nucleic acid to be inserted into an expression vector so that the individual codons for each amino acid are those preferentially utilized in E. coli (Wada et al., (1992) Nucleic Acids Res. 20:2111-2118). Such alteration of nucleic acid sequences of the invention can be carried out by standard DNA synthesis techniques.

[1366] In another embodiment, the IC47611 expression vector is a yeast expression vector. Examples of vectors for expression in yeast S. cerevisiae include pYepSec1 (Baldari, et al., (1987) EMBO J. 6:229-234), pMFa (Kurjan and Herskowitz, (1982) Cell 30:933-943), pJRY88 (Schultz et al., (1987) Gene 54:113-123), pYES2 (Invitrogen Corporation, San Diego, Calif.), and picZ (Invitrogen Corp, San Diego, Calif.).

[1367] Alternatively, IC47611 proteins can be expressed in insect cells using baculovirus expression vectors. Baculovirus vectors available for expression of proteins in cultured insect cells (e.g., Sf 9 cells) include the pAc series (Smith et al. (1983) Mol. Cell Biol. 3:2156-2165) and the pVL series (Lucklow and Summers (1989) Virology 170:31-39).

[1368] In yet another embodiment, a nucleic acid of the invention is expressed in mammalian cells using a mammalian expression vector. Examples of mammalian expression vectors include pCDM8 (Seed, B. (1987) Nature 329:840) and pMT2PC (Kaufman et al. (1987) EMBO J. 6:187-195). When used in mammalian cells, the expression vector's control functions are often provided by viral regulatory elements. For example, commonly used promoters are derived from polyoma, Adenovirus 2, cytomegalovirus and Simian Virus 40. For other suitable expression systems for both prokaryotic and eukaryotic cells see chapters 16 and 17 of Sambrook, J., Fritsh, E. F., and Maniatis, T. Molecular Cloning: A Laboratory Manual. 2nd, ed, Cold Spring Harbor Laboratory, Cold Spring Harbor Laboratory Press, Cold Spring Harbor, N.Y., 1989.

[1369] In another embodiment, the recombinant mammalian expression vector is capable of directing expression of the nucleic acid preferentially in a particular cell type (e.g., tissue-specific regulatory elements are used to express the nucleic acid). Tissue-specific regulatory elements are known in the art. Non-limiting examples of suitable tissue-specific promoters include the albumin promoter (liver-specific; Pinkert et al. (1987) Genes Dev. 1:268-277), lymphoid-specific promoters (Calame and Eaton (1988) Adv. Immunol. 43:235-275), in particular promoters of T cell receptors (Winoto and Baltimore (1989) EMBO J. 8:729-733) and immunoglobulins (Banerji et al. (1983) Cell 33:729-740; Queen and Baltimore (1983) Cell 33:741-748), neuron-specific promoters (e.g., the neurofilament promoter; Byrne and Ruddle (1989) Proc. Natl. Acad. Sci. USA 86:5473-5477), pancreas-specific promoters (Edlund et al. (1985) Science 230:912-916), and mammary gland-specific promoters (e.g., milk whey promoter; U.S. Pat. No. 4,873,316 and European Application Publication No. 264,166). Developmentally-regulated promoters are also encompassed, for example the murine hox promoters (Kessel and Gruss (1990) Science 249:374-379) and the α-fetoprotein promoter (Campes and Tilghman (1989) Genes Dev. 3:537-546).

[1370] The invention further provides a recombinant expression vector comprising a DNA molecule of the invention cloned into the expression vector in an antisense orientation. That is, the DNA molecule is operatively linked to a regulatory sequence in a manner which allows for expression (by transcription of the DNA molecule) of an RNA molecule which is antisense to IC47611 mRNA. Regulatory sequences operatively linked to a nucleic acid cloned in the antisense orientation can be chosen which direct the continuous expression of the antisense RNA molecule in a variety of cell types, for instance viral promoters and/or enhancers, or regulatory sequences can be chosen which direct constitutive, tissue specific or cell type specific expression of antisense RNA. The antisense expression vector can be in the form of a recombinant plasmid, phagemid or attenuated virus in which antisense nucleic acids are produced under the control of a high efficiency regulatory region, the activity of which can be determined by the cell type into which the vector is introduced. For a discussion of the regulation of gene expression using antisense genes see Weintraub, H. et al., Antisense RNA as a molecular tool for genetic analysis, Reviews—Trends in Genetics, Vol. 1(1) 1986.

[1371] Another aspect of the invention pertains to host cells into which an IC47611 nucleic acid molecule of the invention is introduced, e.g., an IC47611 nucleic acid molecule within a recombinant expression vector or an IC47611 nucleic acid molecule containing sequences which allow it to homologously recombine into a specific site of the host cell's genome. The terms “host cell” and “recombinant host cell” are used interchangeably herein. It is understood that such terms refer not only to the particular subject cell but to the progeny or potential progeny of such a cell. Because certain modifications may occur in succeeding generations due to either mutation or environmental influences, such progeny may not, in fact, be identical to the parent cell, but are still included within the scope of the term as used herein.

[1372] A host cell can be any prokaryotic or eukaryotic cell. For example, an IC47611 protein can be expressed in bacterial cells such as E. coli, insect cells, yeast or mammalian cells (such as Chinese hamster ovary cells (CHO) or COS cells). Other suitable host cells are known to those skilled in the art.

[1373] Vector DNA can be introduced into prokaryotic or eukaryotic cells via conventional transformation or transfection techniques. As used herein, the terms “transformation” and “transfection” are intended to refer to a variety of art-recognized techniques for introducing foreign nucleic acid (e.g., DNA) into a host cell, including calcium phosphate or calcium chloride co-precipitation, DEAE-dextran-mediated transfection, lipofection, or electroporation. Suitable methods for transforming or transfecting host cells can be found in Sambrook, et al. (Molecular Cloning: A Laboratory Manual. 2nd, ed, Cold Spring Harbor Laboratory, Cold Spring Harbor Laboratory Press, Cold Spring Harbor, N.Y., 1989), and other laboratory manuals.

[1374] For stable transfection of mammalian cells, it is known that, depending upon the expression vector and transfection technique used, only a small fraction of cells may integrate the foreign DNA into their genome. In order to identify and select these integrants, a gene that encodes a selectable marker (e.g., resistance to antibiotics) is generally introduced into the host cells along with the gene of interest. Preferred selectable markers include those which confer resistance to drugs, such as G418, hygromycin and methotrexate. Nucleic acid encoding a selectable marker can be introduced into a host cell on the same vector as that encoding an IC47611 protein or can be introduced on a separate vector. Cells stably transfected with the introduced nucleic acid can be identified by drug selection (e.g., cells that have incorporated the selectable marker gene will survive, while the other cells die).

[1375] A host cell of the invention, such as a prokaryotic or eukaryotic host cell in culture, can be used to produce (i.e., express) an IC47611 protein. Accordingly, the invention further provides methods for producing an IC47611 protein using the host cells of the invention. In one embodiment, the method comprises culturing the host cell of the invention (into which a recombinant expression vector encoding an IC47611 protein has been introduced) in a suitable medium such that an IC47611 protein is produced. In another embodiment, the method further comprises isolating an IC47611 protein from the medium or the host cell.

[1376] The host cells of the invention can also be used to produce non-human transgenic animals. For example, in one embodiment, a host cell of the invention is a fertilized oocyte or an embryonic stem cell into which IC47611-coding sequences have been introduced. Such host cells can then be used to create non-human transgenic animals in which exogenous IC47611 sequences have been introduced into their genome or homologous recombinant animals in which endogenous IC47611 sequences have been altered. Such animals are useful for studying the function and/or activity of an IC47611 and for identifying and/or evaluating modulators of IC47611 activity. As used herein, a “transgenic animal” is a non-human animal, preferably a mammal, more preferably a rodent such as a rat or mouse, in which one or more of the cells of the animal includes a transgene. Other examples of transgenic animals include non-human primates, sheep, dogs, cows, goats, chickens, amphibians, and the like. A transgene is exogenous DNA which is integrated into the genome of a cell from which a transgenic animal develops and which remains in the genome of the mature animal, thereby directing the expression of an encoded gene product in one or more cell types or tissues of the transgenic animal. As used herein, a “homologous recombinant animal” is a non-human animal, preferably a mammal, more preferably a mouse, in which an endogenous IC47611 gene has been altered by homologous recombination between the endogenous gene and an exogenous DNA molecule introduced into a cell of the animal, e.g., an embryonic cell of the animal, prior to development of the animal.

[1377] A transgenic animal of the invention can be created by introducing an IC47611-encoding nucleic acid into the male pronuclei of a fertilized oocyte, e.g., by microinjection, retroviral infection, and allowing the oocyte to develop in a pseudopregnant female foster animal. The IC47611 cDNA sequence of SEQ ID NO:31 can be introduced as a transgene into the genome of a non-human animal. Alternatively, a nonhuman homologue of a human IC47611 gene, such as a mouse or rat IC47611 gene, can be used as a transgene. Alternatively, an IC47611 gene homologue, such as another IC47611 family member, can be isolated based on hybridization to the IC47611 cDNA sequences of SEQ ID NO:31 or 33, or the DNA insert of the plasmid deposited with ATCC as Accession Number ______ (described further in subsection I above) and used as a transgene. Intronic sequences and polyadenylation signals can also be included in the transgene to increase the efficiency of expression of the transgene. A tissue-specific regulatory sequence(s) can be operably linked to an IC47611 transgene to direct expression of an IC47611 protein to particular cells. Methods for generating transgenic animals via embryo manipulation and microinjection, particularly animals such as mice, have become conventional in the art and are described, for example, in U.S. Pat. Nos. 4,736,866 and 4,870,009, both by Leder et al., U.S. Pat. No. 4,873,191 by Wagner et al. and in Hogan, B., Manipulating the Mouse Embryo, (Cold Spring Harbor Laboratory Press, Cold Spring Harbor, N.Y., 1986). Similar methods are used for production of other transgenic animals. A transgenic founder animal can be identified based upon the presence of an IC47611 transgene in its genome and/or expression of IC47611 mRNA in tissues or cells of the animals. A transgenic founder animal can then be used to breed additional animals carrying the transgene. Moreover, transgenic animals carrying a transgene encoding an IC47611 protein can further be bred to other transgenic animals carrying other transgenes.

[1378] To create a homologous recombinant animal, a vector is prepared which contains at least a portion of an IC47611 gene into which a deletion, addition or substitution has been introduced to thereby alter, e.g., functionally disrupt, the IC47611 gene. The IC47611 gene can be a human gene (e.g., the cDNA of SEQ ID NO:33), but more preferably, is a non-human homologue of a human IC47611 gene (e.g., a cDNA isolated by stringent hybridization with the nucleotide sequence of SEQ ID NO:31). For example, a mouse IC47611 gene can be used to construct a homologous recombination nucleic acid molecule, e.g., a vector, suitable for altering an endogenous IC47611 gene in the mouse genome. In a preferred embodiment, the homologous recombination nucleic acid molecule is designed such that, upon homologous recombination, the endogenous IC47611 gene is functionally disrupted (i.e., no longer encodes a functional protein; also referred to as a “knock out” vector). Alternatively, the homologous recombination nucleic acid molecule can be designed such that, upon homologous recombination, the endogenous IC47611 gene is mutated or otherwise altered but still encodes functional protein (e.g., the upstream regulatory region can be altered to thereby alter the expression of the endogenous IC47611 protein). In the homologous recombination nucleic acid molecule, the altered portion of the IC47611 gene is flanked at its 5′ and 3′ ends by additional nucleic acid sequence of the IC47611 gene to allow for homologous recombination to occur between the exogenous IC47611 gene carried by the homologous recombination nucleic acid molecule and an endogenous IC47611 gene in a cell, e.g., an embryonic stem cell. The additional flanking IC47611 nucleic acid sequence is of sufficient length for successful homologous recombination with the endogenous gene. Typically, several kilobases of flanking DNA (both at the 5′ and 3′ ends) are included in the homologous recombination nucleic acid molecule (see, e.g., Thomas, K. R. and Capecchi, M. R. (1987) Cell 51:503 for a description of homologous recombination vectors). The homologous recombination nucleic acid molecule is introduced into a cell, e.g., an embryonic stem cell line (e.g., by electroporation) and cells in which the introduced IC47611 gene has homologously recombined with the endogenous IC47611 gene are selected (see e.g., Li, E. et al. (1992) Cell 69:915). The selected cells can then be injected into a blastocyst of an animal (e.g., a mouse) to form aggregation chimeras (see e.g., Bradley, A. in Teratocarcinomas and Embryonic Stem Cells: A Practical Approach, E. J. Robertson, ed. (IRL, Oxford, 1987) pp. 113-152). A chimeric embryo can then be implanted into a suitable pseudopregnant female foster animal and the embryo brought to term. Progeny harboring the homologously recombined DNA in their germ cells can be used to breed animals in which all cells of the animal contain the homologously recombined DNA by germline transmission of the transgene. Methods for constructing homologous recombination nucleic acid molecules, e.g., vectors, or homologous recombinant animals are described further in Bradley, A. (1991) Current Opinion in Biotechnology 2:823-829 and in PCT International Publication Nos.: WO 90/11354 by Le Mouellec et al.; WO 91/01140 by Smithies et al.; WO 92/0968 by Zijlstra et al.; and WO 93/04169 by Berns et al.

[1379] In another embodiment, transgenic non-human animals can be produced which contain selected systems which allow for regulated expression of the transgene. One example of such a system is the cre/loxP recombinase system of bacteriophage P1. For a description of the cre/loxP recombinase system, see, e.g., Lakso et al. (1992) Proc. Natl. Acad. Sci. USA 89:6232-6236. Another example of a recombinase system is the FLP recombinase system of Saccharomyces cerevisiae (O'Gorman et al. (1991) Science 251:1351-1355. If a cre/loxP recombinase system is used to regulate expression of the transgene, animals containing transgenes encoding both the Cre recombinase and a selected protein are required. Such animals can be provided through the construction of “double” transgenic animals, e.g., by mating two transgenic animals, one containing a transgene encoding a selected protein and the other containing a transgene encoding a recombinase.

[1380] Clones of the non-human transgenic animals described herein can also be produced according to the methods described in Wilmut, I. et al. (1997) Nature 385:810-813 and PCT International Publication Nos. WO 97/07668 and WO 97/07669. In brief, a cell, e.g., a somatic cell, from the transgenic animal can be isolated and induced to exit the growth cycle and enter G₀ phase. The quiescent cell can then be fused, e.g., through the use of electrical pulses, to an enucleated oocyte from an animal of the same species from which the quiescent cell is isolated. The reconstructed oocyte is then cultured such that it develops to morula or blastocyte and then transferred to pseudopregnant female foster animal. The offspring borne of this female foster animal will be a clone of the animal from which the cell, e.g., the somatic cell, is isolated.

[1381] IV. Pharmaceutical Compositions

[1382] The IC47611 nucleic acid molecules, fragments of IC47611 proteins, and anti-IC47611 antibodies (also referred to herein as “active compounds”) of the invention can be incorporated into pharmaceutical compositions suitable for administration. Such compositions typically comprise the nucleic acid molecule, protein, or antibody and a pharmaceutically acceptable carrier. As used herein the language “pharmaceutically acceptable carrier” is intended to include any and all solvents, dispersion media, coatings, antibacterial and antifungal agents, isotonic and absorption delaying agents, and the like, compatible with pharmaceutical administration. The use of such media and agents for pharmaceutically active substances is well known in the art. Except insofar as any conventional media or agent is incompatible with the active compound, use thereof in the compositions is contemplated. Supplementary active compounds can also be incorporated into the compositions.

[1383] A pharmaceutical composition of the invention is formulated to be compatible with its intended route of administration. Examples of routes of administration include parenteral, e.g., intravenous, intradermal, subcutaneous, oral (e.g., inhalation), transdermal (topical), transmucosal, and rectal administration. Solutions or suspensions used for parenteral, intradermal, or subcutaneous application can include the following components: a sterile diluent such as water for injection, saline solution, fixed oils, polyethylene glycols, glycerine, propylene glycol or other synthetic solvents; antibacterial agents such as benzyl alcohol or methyl parabens; antioxidants such as ascorbic acid or sodium bisulfite; chelating agents such as ethylenediaminetetraacetic acid; buffers such as acetates, citrates or phosphates and agents for the adjustment of tonicity such as sodium chloride or dextrose. pH can be adjusted with acids or bases, such as hydrochloric acid or sodium hydroxide. The parenteral preparation can be enclosed in ampoules, disposable syringes or multiple dose vials made of glass or plastic.

[1384] Pharmaceutical compositions suitable for injectable use include sterile aqueous solutions (where water soluble) or dispersions and sterile powders for the extemporaneous preparation of sterile injectable solutions or dispersion. For intravenous administration, suitable carriers include physiological saline, bacteriostatic water, Cremophor EL™ (BASF, Parsippany, N.J.) or phosphate buffered saline (PBS). In all cases, the composition must be sterile and should be fluid to the extent that easy syringeability exists. It must be stable under the conditions of manufacture and storage and must be preserved against the contaminating action of microorganisms such as bacteria and fungi. The carrier can be a solvent or dispersion medium containing, for example, water, ethanol, polyol (for example, glycerol, propylene glycol, and liquid polyetheylene glycol, and the like), and suitable mixtures thereof. The proper fluidity can be maintained, for example, by the use of a coating such as lecithin, by the maintenance of the required particle size in the case of dispersion and by the use of surfactants. Prevention of the action of microorganisms can be achieved by various antibacterial and antifungal agents, for example, parabens, chlorobutanol, phenol, ascorbic acid, thimerosal, and the like. In many cases, it will be preferable to include isotonic agents, for example, sugars, polyalcohols such as manitol, sorbitol, sodium chloride in the composition. Prolonged absorption of the injectable compositions can be brought about by including in the composition an agent which delays absorption, for example, aluminum monostearate and gelatin.

[1385] Sterile injectable solutions can be prepared by incorporating the active compound (e.g, a fragment of an IC47611 protein or an anti-IC47611 antibody) in the required amount in an appropriate solvent with one or a combination of ingredients enumerated above, as required, followed by filtered sterilization. Generally, dispersions are prepared by incorporating the active compound into a sterile vehicle which contains a basic dispersion medium and the required other ingredients from those enumerated above. In the case of sterile powders for the preparation of sterile injectable solutions, the preferred methods of preparation are vacuum drying and freeze-drying which yields a powder of the active ingredient plus any additional desired ingredient from a previously sterile-filtered solution thereof.

[1386] Oral compositions generally include an inert diluent or an edible carrier. They can be enclosed in gelatin capsules or compressed into tablets. For the purpose of oral therapeutic administration, the active compound can be incorporated with excipients and used in the form of tablets, troches, or capsules. oral compositions can also be prepared using a fluid carrier for use as a mouthwash, wherein the compound in the fluid carrier is applied orally and swished and expectorated or swallowed. Pharmaceutically compatible binding agents, and/or adjuvant materials can be included as part of the composition. The tablets, pills, capsules, troches and the like can contain any of the following ingredients, or compounds of a similar nature: a binder such as microcrystalline cellulose, gum tragacanth or gelatin; an excipient such as starch or lactose, a disintegrating agent such as alginic acid, Primogel, or corn starch; a lubricant such as magnesium stearate or Sterotes; a glidant such as colloidal silicon dioxide; a sweetening agent such as sucrose or saccharin; or a flavoring agent such as peppermint, methyl salicylate, or orange flavoring.

[1387] For administration by inhalation, the compounds are delivered in the form of an aerosol spray from pressured container or dispenser which contains a suitable propellant, e.g., a gas such as carbon dioxide, or a nebulizer.

[1388] Systemic administration can also be by transmucosal or transdermal means. For transmucosal or transdermal administration, penetrants appropriate to the barrier to be permeated are used in the formulation. Such penetrants are generally known in the art, and include, for example, for transmucosal administration, detergents, bile salts, and fusidic acid derivatives. Transmucosal administration can be accomplished through the use of nasal sprays or suppositories. For transdermal administration, the active compounds are formulated into ointments, salves, gels, or creams as generally known in the art.

[1389] The compounds can also be prepared in the form of suppositories (e.g., with conventional suppository bases such as cocoa butter and other glycerides) or retention enemas for rectal delivery.

[1390] In one embodiment, the active compounds are prepared with carriers that will protect the compound against rapid elimination from the body, such as a controlled release formulation, including implants and microencapsulated delivery systems. Biodegradable, biocompatible polymers can be used, such as ethylene vinyl acetate, polyanhydrides, polyglycolic acid, collagen, polyorthoesters, and polylactic acid. Methods for preparation of such formulations will be apparent to those skilled in the art. The materials can also be obtained commercially from Alza Corporation and Nova Pharmaceuticals, Inc. Liposomal suspensions (including liposomes targeted to infected cells with monoclonal antibodies to viral antigens) can also be used as pharmaceutically acceptable carriers. These can be prepared according to methods known to those skilled in the art, for example, as described in U.S. Pat. No. 4,522,811.

[1391] It is especially advantageous to formulate oral or parenteral compositions in dosage unit form for ease of administration and uniformity of dosage. Dosage unit form as used herein refers to physically discrete units suited as unitary dosages for the subject to be treated; each unit containing a predetermined quantity of active compound calculated to produce the desired therapeutic effect in association with the required pharmaceutical carrier. The specification for the dosage unit forms of the invention are dictated by and directly dependent on the unique characteristics of the active compound and the particular therapeutic effect to be achieved, and the limitations inherent in the art of compounding such an active compound for the treatment of individuals.

[1392] Toxicity and therapeutic efficacy of such compounds can be determined by standard pharmaceutical procedures in cell cultures or experimental animals, e.g., for determining the LD50 (the dose lethal to 50% of the population) and the ED50 (the dose therapeutically effective in 50% of the population). The dose ratio between toxic and therapeutic effects is the therapeutic index and it can be expressed as the ratio LD50/ED50. Compounds which exhibit large therapeutic indices are preferred. While compounds that exhibit toxic side effects may be used, care should be taken to design a delivery system that targets such compounds to the site of affected tissue in order to minimize potential damage to uninfected cells and, thereby, reduce side effects.

[1393] The data obtained from the cell culture assays and animal studies can be used in formulating a range of dosage for use in humans. The dosage of such compounds lies preferably within a range of circulating concentrations that include the ED50 with little or no toxicity. The dosage may vary within this range depending upon the dosage form employed and the route of administration utilized. For any compound used in the method of the invention, the therapeutically effective dose can be estimated initially from cell culture assays. A dose may be formulated in animal models to achieve a circulating plasma concentration range that includes the IC50 (i.e., the concentration of the test compound which achieves a half-maximal inhibition of symptoms) as determined in cell culture. Such information can be used to more accurately determine useful doses in humans. Levels in plasma may be measured, for example, by high performance liquid chromatography.

[1394] As defined herein, a therapeutically effective amount of protein or polypeptide (i.e., an effective dosage) ranges from about 0.001 to 30 mg/kg body weight, preferably about 0.01 to 25 mg/kg body weight, more preferably about 0.1 to 20 mg/kg body weight, and even more preferably about 1 to 10 mg/kg, 2 to 9 mg/kg, 3 to 8 mg/kg, 4 to 7 mg/kg, or 5 to 6 mg/kg body weight. The skilled artisan will appreciate that certain factors may influence the dosage required to effectively treat a subject, including but not limited to the severity of the disease or disorder, previous treatments, the general health and/or age of the subject, and other diseases present. Moreover, treatment of a subject with a therapeutically effective amount of a protein, polypeptide, or antibody can include a single treatment or, preferably, can include a series of treatments.

[1395] In a preferred example, a subject is treated with antibody, protein, or polypeptide in the range of between about 0.1 to 20 mg/kg body weight, one time per week for between about 1 to 10 weeks, preferably between 2 to 8 weeks, more preferably between about 3 to 7 weeks, and even more preferably for about 4, 5, or 6 weeks. It will also be appreciated that the effective dosage of antibody, protein, or polypeptide used for treatment may increase or decrease over the course of a particular treatment. Changes in dosage may result and become apparent from the results of diagnostic assays as described herein.

[1396] The present invention encompasses agents which modulate expression or activity. An agent may, for example, be a small molecule. For example, such small molecules include, but are not limited to, peptides, peptidomimetics, amino acids, amino acid analogs, polynucleotides, polynucleotide analogs, nucleotides, nucleotide analogs, organic or inorganic compounds (i.e., including heteroorganic and organometallic compounds) having a molecular weight less than about 10,000 grams per mole, organic or inorganic compounds having a molecular weight less than about 5,000 grams per mole, organic or inorganic compounds having a molecular weight less than about 1,000 grams per mole, organic or inorganic compounds having a molecular weight less than about 500 grams per mole, and salts, esters, and other pharmaceutically acceptable forms of such compounds. It is understood that appropriate doses of small molecule agents depends upon a number of factors within the ken of the ordinarily skilled physician, veterinarian, or researcher. The dose(s) of the small molecule will vary, for example, depending upon the identity, size, and condition of the subject or sample being treated, further depending upon the route by which the composition is to be administered, if applicable, and the effect which the practitioner desires the small molecule to have upon the nucleic acid or polypeptide of the invention.

[1397] Exemplary doses include milligram or microgram amounts of the small molecule per kilogram of subject or sample weight (e.g., about 1 microgram per kilogram to about 500 milligrams per kilogram, about 100 micrograms per kilogram to about 5 milligrams per kilogram, or about 1 microgram per kilogram to about 50 micrograms per kilogram. It is furthermore understood that appropriate doses of a small molecule depend upon the potency of the small molecule with respect to the expression or activity to be modulated. Such appropriate doses may be determined using the assays described herein. When one or more of these small molecules is to be administered to an animal (e.g., a human) in order to modulate expression or activity of a polypeptide or nucleic acid of the invention, a physician, veterinarian, or researcher may, for example, prescribe a relatively low dose at first, subsequently increasing the dose until an appropriate response is obtained. In addition, it is understood that the specific dose level for any particular animal subject will depend upon a variety of factors including the activity of the specific compound employed, the age, body weight, general health, gender, and diet of the subject, the time of administration, the route of administration, the rate of excretion, any drug combination, and the degree of expression or activity to be modulated.

[1398] Further, an antibody (or fragment thereof) may be conjugated to a therapeutic moiety such as a cytotoxin, a therapeutic agent or a radioactive metal ion. A cytotoxin or cytotoxic agent includes any agent that is detrimental to cells. Examples include taxol, cytochalasin B, gramicidin D, ethidium bromide, emetine, mitomycin, etoposide, tenoposide, vincristine, vinblastine, colchicin, doxorubicin, daunorubicin, dihydroxy anthracin dione, mitoxantrone, mithramycin, actinomycin D, 1-dehydrotestosterone, glucocorticoids, procaine, tetracaine, lidocaine, propranolol, and puromycin and analogs or homologs thereof. Therapeutic agents include, but are not limited to, antimetabolites (e.g., methotrexate, 6-mercaptopurine, 6-thioguanine, cytarabine, 5-fluorouracil decarbazine), alkylating agents (e.g., mechlorethamine, thioepa chlorambucil, melphalan, carmustine (BSNU) and lomustine (CCNU), cyclothosphamide, busulfan, dibromomannitol, streptozotocin, mitomycin C, and cis-dichlorodiamine platinum (II) (DDP) cisplatin), anthracyclines (e.g., daunorubicin (formerly daunomycin) and doxorubicin), antibiotics (e.g., dactinomycin (formerly actinomycin), bleomycin, mithramycin, and anthramycin (AMC)), and anti-mitotic agents (e.g., vincristine and vinblastine).

[1399] The conjugates of the invention can be used for modifying a given biological response, the drug moiety is not to be construed as limited to classical chemical therapeutic agents. For example, the drug moiety may be a protein or polypeptide possessing a desired biological activity. Such proteins may include, for example, a toxin such as abrin, ricin A, pseudomonas exotoxin, or diphtheria toxin; a protein such as tumor necrosis factor, alpha-interferon, beta-interferon, nerve growth factor, platelet derived growth factor, tissue plasminogen activator; or, biological response modifiers such as, for example, lymphokines, interleukin-1 (“IL-1”), interleukin-2 (“IL-2”), interleukin-6 (“IL-6”), granulocyte macrophage colony stimulating factor (“GM-CSF”), granulocyte colony stimulating factor (“G-CSF”), or other growth factors.

[1400] Techniques for conjugating such therapeutic moiety to antibodies are well known, see, e.g., Arnon et al., “Monoclonal Antibodies For Immunotargeting Of Drugs In Cancer Therapy”, in Monoclonal Antibodies And Cancer Therapy, Reisfeld et al. (eds.), pp. 243-56 (Alan R. Liss, Inc. 1985); Hellstrom et al., “Antibodies For Drug Delivery”, in Controlled Drug Delivery (2nd Ed.), Robinson et al. (eds.), pp. 623-53 (Marcel Dekker, Inc. 1987); Thorpe, “Antibody Carriers Of Cytotoxic Agents In Cancer Therapy: A Review”, in Monoclonal Antibodies '84: Biological And Clinical Applications, Pinchera et al. (eds.), pp. 475-506 (1985); “Analysis, Results, And Future Prospective Of The Therapeutic Use Of Radiolabeled Antibody In Cancer Therapy”, in Monoclonal Antibodies For Cancer Detection And Therapy, Baldwin et al. (eds.), pp. 303-16 (Academic Press 1985), and Thorpe et al., “The Preparation And Cytotoxic Properties Of Antibody-Toxin Conjugates”, Immunol. Rev., 62:119-58 (1982). Alternatively, an antibody can be conjugated to a second antibody to form an antibody heteroconjugate as described by Segal in U.S. Pat. No. 4,676,980.

[1401] The nucleic acid molecules of the invention can be inserted into vectors and used as gene therapy vectors. Gene therapy vectors can be delivered to a subject by, for example, intravenous injection, local administration (see U.S. Pat. No. 5,328,470) or by stereotactic injection (see e.g, Chen et al. (1994) Proc. Natl. Acad. Sci. USA 91:3054-3057). The pharmaceutical preparation of the gene therapy vector can include the gene therapy vector in an acceptable diluent, or can comprise a slow release matrix in which the gene delivery vehicle is imbedded. Alternatively, where the complete gene delivery vector can be produced intact from recombinant cells, e.g., retroviral vectors, the pharmaceutical preparation can include one or more cells which produce the gene delivery system.

[1402] The pharmaceutical compositions can be included in a container, pack, or dispenser together with instructions for administration.

[1403] V. Uses and Methods of the Invention

[1404] The nucleic acid molecules, proteins, protein homologues, and antibodies described herein can be used in one or more of the following methods: a) screening assays; b) predictive medicine (e.g., diagnostic assays, prognostic assays, monitoring clinical trials, and pharmacogenetics); and c) methods of treatment (e.g., therapeutic and prophylactic). As described herein, an IC47611 protein of the invention has one or more of the following activities: (1) modulates membrane excitability, (2) regulates intracellular ion concentration, (3) modulates membrane polarization (e.g., membrane polarization and/or depolarization), (4) regulates action potential, (5) regulates cellular signal transduction, (6) regulates neurotransmitter release (e.g., from neuronal cells), (7) modulates synaptic transmission, (8) regulates neuronal excitability and/or plasticity, (9) regulates muscle contraction, (10) regulate cell activation and (11) regulates cellular proliferation, growth, migration and/or differentiation.

[1405] The isolated nucleic acid molecules of the invention can be used, for example, to express IC47611 protein (e.g., via a recombinant expression vector in a host cell in gene therapy applications), to detect IC47611 mRNA (e.g., in a biological sample) or a genetic alteration in an IC47611 gene, and to modulate IC47611 activity, as described further below. The IC47611 proteins can be used to treat disorders characterized by insufficient or excessive production of an IC47611 substrate or production of IC47611 inhibitors. In addition, the IC47611 proteins can be used to screen for naturally occurring IC47611 substrates, to screen for drugs or compounds which modulate IC47611 activity, as well as to treat disorders characterized by insufficient or excessive production of IC47611 protein or production of IC47611 protein forms which have decreased, aberrant or unwanted activity compared to IC47611 wild type protein (e.g., proliferative disorders, CNS disorders such as cognitive and neurodegenerative disorders (e.g., Alzheimer's disease, dementias related to Alzheimer's disease (such as Pick's disease), Parkinson's and other Lewy diffuse body diseases, senile dementia, Huntington's disease, Gilles de la Tourette's syndrome, multiple sclerosis, amyotrophic lateral sclerosis, progressive supranuclear palsy, epilepsy, and Jakob-Creutzfieldt disease; autonomic function disorders such as hypertension and sleep disorders, and neuropsychiatric disorders, such as depression, schizophrenia, schizoaffective disorder, korsakoff's psychosis, mania, anxiety disorders, or phobic disorders; learning or memory disorders, e.g., amnesia or age-related memory loss, attention deficit disorder, dysthymic disorder, major depressive disorder, mania, obsessive-compulsive disorder, psychoactive substance use disorders, anxiety, phobias, panic disorder, and bipolar affective disorder (e.g., severe bipolar affective (mood) disorder (BP-1) and bipolar affective neurological disorders (e.g., migraine and obesity)); pain disorders; cardiac disorders (e.g., arteriosclerosis, ischemia reperfusion injury, restenosis, arterial inflammation, vascular wall remodeling, ventricular remodeling, rapid ventricular pacing, coronary microembolism, tachycardia, bradycardia, pressure overload, aortic bending, coronary artery ligation, vascular heart disease, atrial fibrilation, Jervell syndrome, Lange-Nielsen syndrome, long-QT syndrome, congestive heart failure, sinus node dysfunction, angina, heart failure, hypertension, atrial fibrillation, atrial flutter, dilated cardiomyopathy, idiopathic cardiomyopathy, myocardial infarction, coronary artery disease, coronary artery spasm, and arrhythmia), muscular disorders (e.g., paralysis, muscle weakness (e.g., ataxia, myotonia, and myokymia), muscular dystrophy (e.g., Duchenne muscular dystrophy or myotonic dystrophy), spinal muscular atrophy, congenital myopathies, central core disease, rod myopathy, central nuclear myopathy, Lambert-Eaton syndrome, denervation, and infantile spinal muscular atrophy (Werdnig-Hoffman disease), and cellular growth, differentiation, or migration disorders (e.g., cancer, e.g., carcinoma, sarcoma, or leukemia; tumor angiogenesis and metastasis; skeletal dysplasia; neuronal deficiencies resulting from impaired neural induction and patterning; hepatic disorders; cardiovascular disorders; and hematopoietic and/or myeloproliferative disorders). Moreover, the anti-IC47611 antibodies of the invention can be used to detect and isolate IC47611 proteins, regulate the bioavailability of IC47611 proteins, and modulate IC47611 activity.

[1406] A. Screening Assays:

[1407] The invention provides a method (also referred to herein as a “screening assay”) for identifying modulators, i.e., candidate or test compounds or agents (e.g., peptides, peptidomimetics, small molecules or other drugs) which bind to IC47611 proteins, have a stimulatory or inhibitory effect on, for example, IC47611 expression or IC47611 activity, or have a stimulatory or inhibitory effect on, for example, the expression or activity of IC47611 substrate.

[1408] In one embodiment, the invention provides assays for screening candidate or test compounds which are substrates of an IC47611 protein or polypeptide or biologically active portion thereof. In another embodiment, the invention provides assays for screening candidate or test compounds which bind to or modulate the activity of an IC47611 protein or polypeptide or biologically active portion thereof. The test compounds of the present invention can be obtained using any of the numerous approaches in combinatorial library methods known in the art, including: biological libraries; spatially addressable parallel solid phase or solution phase libraries; synthetic library methods requiring deconvolution; the ‘one-bead one-compound’ library method; and synthetic library methods using affinity chromatography selection. The biological library approach is limited to peptide libraries, while the other four approaches are applicable to peptide, non-peptide oligomer or small molecule libraries of compounds (Lam, K. S. (1997) Anticancer Drug Des. 12:145).

[1409] Examples of methods for the synthesis of molecular libraries can be found in the art, for example in: DeWitt et al. (1993) Proc. Natl. Acad. Sci. U.S.A. 90:6909; Erb et al. (1994) Proc. Natl. Acad. Sci. USA 91: 11422; Zuckermann et al. (1994). J. Med. Chem. 37:2678; Cho et al. (1993) Science 261:1303; Carrell et al. (1994) Angew. Chem. Int. Ed. Engl. 33:2059; Carell et al. (1994) Angew. Chem. Int. Ed. Engl. 33:2061; and in Gallop et al. (1994) J. Med. Chem. 37:1233.

[1410] Libraries of compounds may be presented in solution (e.g., Houghten (1992) Biotechniques 13:412-421), or on beads (Lam (1991) Nature 354:82-84), chips (Fodor (1993) Nature 364:555-556), bacteria (Ladner U.S. Pat. No. 5,223,409), spores (Ladner U.S. Pat. No. '409), plasmids (Cull et al. (1992) Proc. Natl. Acad. Sci. USA 89:1865-1869) or on phage (Scott and Smith (1990) Science 249:386-390); (Devlin (1990) Science 249:404-406); (Cwirla et al. (1990) Proc. Natl. Acad. Sci. 87:6378-6382); (Felici (1991) J. Mol. Biol. 222:301-310); (Ladner supra.).

[1411] In one embodiment, an assay is a cell-based assay in which a cell which expresses an IC47611 protein or biologically active portion thereof is contacted with a test compound and the ability of the test compound to modulate IC47611 activity is determined. Determining the ability of the test compound to modulate IC47611 activity can be accomplished by monitoring, for example, the release of a neurotransmitter from a cell which expresses IC47611. The cell, for example, can be of mammalian origin, e.g., a neuronal cell or a thymus cell. The ability of the test compound to modulate IC47611 binding to a substrate or to bind to IC47611 can also be determined. Determining the ability of the test compound to modulate IC47611 binding to a substrate can be accomplished, for example, by coupling the IC47611 substrate with a radioisotope or enzymatic label such that binding of the IC47611 substrate to IC47611 can be determined by detecting the labeled IC47611 substrate in a complex. Alternatively, IC47611 could be coupled with a radioisotope or enzymatic label to monitor the ability of a test compound to modulate IC47611 binding to an IC47611 substrate in a complex. Determining the ability of the test compound to bind IC47611 can be accomplished, for example, by coupling the compound with a radioisotope or enzymatic label such that binding of the compound to IC47611 can be determined by detecting the labeled IC47611 compound in a complex. For example, compounds (e.g., IC47611 substrates) can be labeled with ¹²⁵I, ³⁵S, ¹⁴C, or ³H, either directly or indirectly, and the radioisotope detected by direct counting of radioemission or by scintillation counting. Alternatively, compounds can be enzymatically labeled with, for example, horseradish peroxidase, alkaline phosphatase, or luciferase, and the enzymatic label detected by determination of conversion of an appropriate substrate to product.

[1412] It is also within the scope of this invention to determine the ability of a compound (e.g., an IC47611 substrate) to interact with IC47611 without the labeling of any of the interactants. For example, a microphysiometer can be used to detect the interaction of a compound with IC47611 without the labeling of either the compound or the IC47611. McConnell, H. M. et al. (1992) Science 257:1906-1912. As used herein, a “microphysiometer” (e.g., Cytosensor) is an analytical instrument that measures the rate at which a cell acidifies its environment using a light-addressable potentiometric sensor (LAPS). Changes in this acidification rate can be used as an indicator of the interaction between a compound and IC47611.

[1413] In another embodiment, an assay is a cell-based assay comprising contacting a cell expressing an IC47611 target molecule (e.g., an IC47611 substrate) with a test compound and determining the ability of the test compound to modulate (e.g., stimulate or inhibit) the activity of the IC47611 target molecule. Determining the ability of the test compound to modulate the activity of an IC47611 target molecule can be accomplished, for example, by determining the ability of the IC47611 protein to bind to or interact with the IC47611 target molecule.

[1414] Determining the ability of the IC47611 protein, or a biologically active fragment thereof, to bind to or interact with an IC47611 target molecule can be accomplished by one of the methods described above for determining direct binding. In a preferred embodiment, determining the ability of the IC47611 protein to bind to or interact with an IC47611 target molecule can be accomplished by determining the activity of the target molecule. For example, the activity of the target molecule can be determined by detecting induction of a cellular second messenger of the target (i.e., intracellular Ca²⁺, diacylglycerol, IP₃, and the like), detecting catalytic/enzymatic activity of the target using an appropriate substrate, detecting the induction of a reporter gene (comprising a target-responsive regulatory element operatively linked to a nucleic acid encoding a detectable marker, e.g., luciferase), or detecting a target regulated cellular response.

[1415] In yet another embodiment, an assay of the present invention is a cell-free assay in which an IC47611 protein or biologically active portion thereof is-contacted with a test compound and the ability of the test compound to bind to the IC47611 protein or biologically active portion thereof is determined. Preferred biologically active portions of the IC47611 proteins to be used in assays of the present invention include fragments which participate in interactions with non-IC47611 molecules, e.g., fragments with high surface probability scores (see, for example, FIG. 25). Binding of the test compound to the IC47611 protein can be determined either directly or indirectly as described above. In a preferred embodiment, the assay includes contacting the IC47611 protein or biologically active portion thereof with a known compound which binds IC47611 to form an assay mixture, contacting the assay mixture with a test compound, and determining the ability of the test compound to interact with an IC47611 protein, wherein determining the ability of the test compound to interact with an IC47611 protein comprises determining the ability of the test compound to preferentially bind to IC47611 or biologically active portion thereof as compared to the known compound.

[1416] In another embodiment, the assay is a cell-free assay in which an IC47611 protein or biologically active portion thereof is contacted with a test compound and the ability of the test compound to modulate (e.g., stimulate or inhibit) the activity of the IC47611 protein or biologically active portion thereof is determined. Determining the ability of the test compound to modulate the activity of an IC47611 protein can be accomplished, for example, by determining the ability of the IC47611 protein to bind to an IC47611 target molecule by one of the methods described above for determining direct binding. Determining the ability of the IC47611 protein to bind to an IC47611 target molecule can also be accomplished using a technology such as real-time Biomolecular Interaction Analysis (BIA). Sjolander, S. and Urbaniczky, C. (1991) Anal. Chem. 63:2338-2345 and Szabo et al. (1995) Curr. Opin. Struct. Biol. 5:699-705. As used herein, “BIA” is a technology for studying biospecific interactions in real time, without labeling any of the interactants (e.g., BIAcore). Changes in the optical phenomenon of surface plasmon resonance (SPR) can be used as an indication of real-time reactions between biological molecules.

[1417] In an alternative embodiment, determining the ability of the test compound to modulate the activity of an IC47611 protein can be accomplished by determining the ability of the IC47611 protein to further modulate the activity of a downstream effector of an IC47611 target molecule. For example, the activity of the effector molecule on an appropriate target can be determined or the binding of the effector to an appropriate target can be determined as previously described.

[1418] In yet another embodiment, the cell-free assay involves contacting an IC47611 protein or biologically active portion thereof with a known compound which binds the IC47611 protein to form an assay mixture, contacting the assay mixture with a test compound, and determining the ability of the test compound to interact with the IC47611 protein, wherein determining the ability of the test compound to interact with the IC47611 protein comprises determining the ability of the IC47611protein to preferentially bind to or modulate the activity of an IC47611 target molecule.

[1419] In more than one embodiment of the above assay methods of the present invention, it may be desirable to immobilize either IC47611 or its target molecule to facilitate separation of complexed from uncomplexed forms of one or both of the proteins, as well as to accommodate automation of the assay. Binding of a test compound to an IC47611 protein, or interaction of an IC47611 protein with a target molecule in the presence and absence of a candidate compound, can be accomplished in any vessel suitable for containing the reactants. Examples of such vessels include microtitre plates, test tubes, and micro-centrifuge tubes. In one embodiment, a fusion protein can be provided which adds a domain that allows one or both of the proteins to be bound to a matrix. For example, glutathione-S-transferase/IC47611 fusion proteins or glutathione-S-transferase/target fusion proteins can be adsorbed onto glutathione sepharose beads (Sigma Chemical, St. Louis, Mo.) or glutathione derivatized microtitre plates, which are then combined with the test compound or the test compound and either the non-adsorbed target protein or IC47611 protein, and the mixture incubated under conditions conducive to complex formation (e.g., at physiological conditions for salt and pH). Following incubation, the beads or microtitre plate wells are washed to remove any unbound components, the matrix immobilized in the case of beads, complex determined either directly or indirectly, for example, as described above. Alternatively, the complexes can be dissociated from the matrix, and the level of IC47611 binding or activity determined using standard techniques.

[1420] Other techniques for immobilizing proteins on matrices can also be used in the screening assays of the invention. For example, either an IC47611 protein or an IC47611 target molecule can be immobilized utilizing conjugation of biotin and streptavidin. Biotinylated IC47611 protein or target molecules can be prepared from biotin-NHS (N-hydroxy-succinimide) using techniques known in the art (e.g., biotinylation kit, Pierce Chemicals, Rockford, Ill.), and immobilized in the wells of streptavidin-coated 96 well plates (Pierce Chemical). Alternatively, antibodies reactive with IC47611 protein or target molecules but which do not interfere with binding of the IC47611 protein to its target molecule can be derivatized to the wells of the plate, and unbound target or IC47611 protein trapped in the wells by antibody conjugation. Methods for detecting such complexes, in addition to those described above for the GST-immobilized complexes, include immunodetection of complexes using antibodies reactive with the IC47611 protein or target molecule, as well as enzyme-linked assays which rely on detecting an enzymatic activity associated with the IC47611 protein or target molecule.

[1421] In another embodiment, modulators of IC47611 expression are identified in a method wherein a cell is contacted with a candidate compound and the expression of IC47611 mRNA or protein in the cell is determined. The level of expression of IC47611 mRNA or protein in the presence of the candidate compound is compared to the level of expression of IC47611 mRNA or protein in the absence of the candidate compound. The candidate compound can then be identified as a modulator of IC47611 expression based on this comparison. For example, when expression of IC47611 mRNA or protein is greater (statistically significantly greater) in the presence of the candidate compound than in its absence, the candidate compound is identified as a stimulator of IC47611 mRNA or protein expression. Alternatively, when expression of IC47611 mRNA or protein is less (statistically significantly less) in the presence of the candidate compound than in its absence, the candidate compound is identified as an inhibitor of IC47611 mRNA or protein expression. The level of IC47611 mRNA or protein expression in the cells can be determined by methods described herein for detecting IC47611 mRNA or protein.

[1422] In yet another aspect of the invention, the IC47611 proteins can be used as “bait proteins” in a two-hybrid assay or three-hybrid assay (see, e.g., U.S. Pat. No. 5,283,317; Zervos et al. (1993) Cell 72:223-232; Madura et al. (1993) J. Biol. Chem. 268:12046-12054; Bartel et al. (1993) Biotechniques 14:920-924; Iwabuchi et al. (1993) Oncogene 8:1693-1696; and Brent WO94/10300), to identify other proteins, which bind to or interact with IC47611 (“IC47611-binding proteins” or “IC47611-bp”) and are involved in IC47611 activity. Such IC47611-binding proteins are also likely to be involved in the propagation of signals by the IC47611 proteins or IC47611 targets as, for example, downstream elements of an IC47611-mediated signaling pathway. Alternatively, such IC47611-binding proteins are likely to be IC47611 inhibitors.

[1423] The two-hybrid system is based on the modular nature of most transcription factors, which consist of separable DNA-binding and activation domains. Briefly, the assay utilizes two different DNA constructs. In one construct, the gene that codes for an IC47611 protein is fused to a gene encoding the DNA binding domain of a known transcription factor (e.g., GAL-4). In the other construct, a DNA sequence, from a library of DNA sequences, that encodes an unidentified protein (“prey” or “sample”) is fused to a gene that codes for the activation domain of the known transcription factor. If the “bait” and the “prey” proteins are able to interact, in vivo, forming an IC47611-dependent complex, the DNA-binding and activation domains of the transcription factor are brought into close proximity. This proximity allows transcription of a reporter gene (e.g., LacZ) which is operably linked to a transcriptional regulatory site responsive to the transcription factor. Expression of the reporter gene can be detected and cell colonies containing the functional transcription factor can be isolated and used to obtain the cloned gene which encodes the protein which interacts with the IC47611 protein.

[1424] In another aspect, the invention pertains to a combination of two or more of the assays described herein. For example, a modulating agent can be identified using a cell-based or a cell free assay, and the ability of the agent to modulate the activity of an IC47611 protein can be confirmed in vivo, e.g., in an animal such as an animal model for cellular transformation and/or tumorigenesis.

[1425] This invention further pertains to novel agents identified by the above-described screening assays. Accordingly, it is within the scope of this invention to further use an agent identified as described herein in an appropriate animal model. For example, an agent identified as described herein (e.g., an IC47611 modulating agent, an antisense IC47611 nucleic acid molecule, an IC47611-specific antibody, or an IC47611-binding partner) can be used in an animal model to determine the efficacy, toxicity, or side effects of treatment with such an agent. Alternatively, an agent identified as described herein can be used in an animal model to determine the mechanism of action of such an agent. Furthermore, this invention pertains to uses of novel agents identified by the above-described screening assays for treatments as described herein.

[1426] B. Detection Assays

[1427] Portions or fragments of the cDNA sequences identified herein (and the corresponding complete gene sequences) can be used in numerous ways as polynucleotide reagents. For example, these sequences can be used to: (i) map their respective genes on a chromosome; and, thus, locate gene regions associated with genetic disease; (ii) identify an individual from a minute biological sample (tissue typing); and (iii) aid in forensic identification of a biological sample. These applications are described in the subsections below.

[1428] 1. Chromosome Mapping

[1429] Once the sequence (or a portion of the sequence) of a gene has been isolated, this sequence can be used to map the location of the gene on a chromosome. This process is called chromosome mapping. Accordingly, portions or fragments of the IC47611 nucleotide sequences, described herein, can be used to map the location of the IC47611 genes on a chromosome. The mapping of the IC47611 sequences to chromosomes is an important first step in correlating these sequences with genes associated with disease.

[1430] Briefly, IC47611 genes can be mapped to chromosomes by preparing PCR primers (preferably 15-25 bp in length) from the IC47611 nucleotide sequences. Computer analysis of the IC47611 sequences can be used to predict primers that do not span more than one exon in the genomic DNA, thus complicating the amplification process. These primers can then be used for PCR screening of somatic cell hybrids containing individual human chromosomes. Only those hybrids containing the human gene corresponding to the IC47611 sequences will yield an amplified fragment.

[1431] Somatic cell hybrids are prepared by fusing somatic cells from different mammals (e.g., human and mouse cells). As hybrids of human and mouse cells grow and divide, they gradually lose human chromosomes in random order, but retain the mouse chromosomes. By using media in which mouse cells cannot grow, because they lack a particular enzyme, but human cells can, the one human chromosome that contains the gene encoding the needed enzyme, will be retained. By using various media, panels of hybrid cell lines can be established. Each cell line in a panel contains either a single human chromosome or a small number of human chromosomes, and a full set of mouse chromosomes, allowing easy mapping of individual genes to specific human chromosomes. (D'Eustachio P. et al. (1983) Science 220:919-924). Somatic cell hybrids containing only fragments of human chromosomes can also be produced by using human chromosomes with translocations and deletions.

[1432] PCR mapping of somatic cell hybrids is a rapid procedure for assigning a particular sequence to a particular chromosome. Three or more sequences can be assigned per day using a single thermal cycler. Using the IC47611 nucleotide sequences to design oligonucleotide primers, sublocalization can be achieved with panels of fragments from specific chromosomes. Other mapping strategies which can similarly be used to map an IC47611 sequence to its chromosome include in situ hybridization (described in Fan, Y. et al. (1990) Proc. Natl. Acad. Sci. USA, 87:6223-27), pre-screening with labeled flow-sorted chromosomes, and pre-selection by hybridization to chromosome specific cDNA libraries.

[1433] Fluorescence in situ hybridization (FISH) of a DNA sequence to a metaphase chromosomal spread can further be used to provide a precise chromosomal location in one step. Chromosome spreads can be made using cells whose division has been blocked in metaphase by a chemical such as colcemid that disrupts the mitotic spindle. The chromosomes can be treated briefly with trypsin, and then stained with Giemsa. A pattern of light and dark bands develops on each chromosome, so that the chromosomes can be identified individually. The FISH technique can be used with a DNA sequence as short as 500 or 600 bases. However, clones larger than 1,000 bases have a higher likelihood of binding to a unique chromosomal location with sufficient signal intensity for simple detection. Preferably 1,000 bases, and more preferably 2,000 bases will suffice to get good results at a reasonable amount of time. For a review of this technique, see Verma et al., Human Chromosomes: A Manual of Basic Techniques (Pergamon Press, New York 1988).

[1434] Reagents for chromosome mapping can be used individually to mark a single chromosome or a single site on that chromosome, or panels of reagents can be used for marking multiple sites and/or multiple chromosomes. Reagents corresponding to noncoding regions of the genes actually are preferred for mapping purposes. Coding sequences are more likely to be conserved within gene families, thus increasing the chance of cross hybridizations during chromosomal mapping.

[1435] Once a sequence has been mapped to a precise chromosomal location, the physical position of the sequence on the chromosome can be correlated with genetic map data. (Such data are found, for example, in V. McKusick, Mendelian Inheritance in Man, available on-line through Johns Hopkins University Welch Medical Library). The relationship between a gene and a disease, mapped to the same chromosomal region, can then be identified through linkage analysis (co-inheritance of physically adjacent genes), described in, for example, Egeland, J. et al. (1987) Nature, 325:783-787.

[1436] Moreover, differences in the DNA sequences between individuals affected and unaffected with a disease associated with the IC47611 gene can be determined. If a mutation is observed in some or all of the affected individuals but not in any unaffected individuals, then the mutation is likely to be the causative agent of the particular disease. Comparison of affected and unaffected individuals generally involves first looking for structural alterations in the chromosomes, such as deletions or translocations that are visible from chromosome spreads or detectable using PCR based on that DNA sequence. Ultimately, complete sequencing of genes from several individuals can be performed to confirm the presence of a mutation and to distinguish mutations from polymorphisms.

[1437] 2. Tissue Typing

[1438] The IC47611 sequences of the present invention can also be used to identify individuals from minute biological samples. The United States military, for example, is considering the use of restriction fragment length polymorphism (RFLP) for identification of its personnel. In this technique, an individual's genomic DNA is digested with one or more restriction enzymes, and probed on a Southern blot -to yield unique bands for identification. This method does not suffer from the current limitations of “Dog Tags” which can be lost, switched, or stolen, making positive identification difficult. The sequences of the present invention are useful as additional DNA markers for RFLP (described in U.S. Pat. No. 5,272,057).

[1439] Furthermore, the sequences of the present invention can be used to provide an alternative technique which determines the actual base-by-base DNA sequence of selected portions of an individual's genome. Thus, the IC47611 nucleotide sequences described herein can be used to prepare two PCR primers from the 5′ and 3′ ends of the sequences. These primers can then be used to amplify an individual's DNA and subsequently sequence it.

[1440] Panels of corresponding DNA sequences from individuals, prepared in this manner, can provide unique individual identifications, as each individual will have a unique set of such DNA sequences due to allelic differences. The sequences of the present invention can be used to obtain such identification sequences from individuals and from tissue. The IC47611 nucleotide sequences of the invention uniquely represent portions of the human genome. Allelic variation occurs to some degree in the coding regions of these sequences, and to a greater degree in the noncoding regions. It is estimated that allelic variation between individual humans occurs with a frequency of about once per each 500 bases. Each of the sequences described herein can, to some degree, be used as a standard against which DNA from an individual can be compared for identification purposes. Because greater numbers of polymorphisms occur in the noncoding regions, fewer sequences are necessary to differentiate individuals. The noncoding sequences of SEQ ID NO:31 can comfortably provide positive individual identification with a panel of perhaps 10 to 1,000 primers which each yield a noncoding amplified sequence of 100 bases. If predicted coding sequences, such as that in SEQ ID NO:33 are used, a more appropriate number of primers for positive individual identification would be 500-2,000.

[1441] If a panel of reagents from IC47611 nucleotide sequences described herein is used to generate a unique identification database for an individual, those same reagents can later be used to identify tissue from that individual. Using the unique identification database, positive identification of the individual, living or dead, can be made from extremely small tissue samples.

[1442] 3. Use of IC47611 Sequences in Forensic Biology

[1443] DNA-based identification techniques can also be used in forensic biology. Forensic biology is a scientific field employing genetic typing of biological evidence found at a crime scene as a means for positively identifying, for example, a perpetrator of a crime. To make such an identification, PCR technology can be used to amplify DNA sequences taken from very small biological samples such as tissues, e.g., hair or skin, or body fluids, e.g., blood, saliva, or semen found at a crime scene. The amplified sequence can then be compared to a standard, thereby allowing identification of the origin of the biological sample.

[1444] The sequences of the present invention can be used to provide polynucleotide reagents, e.g., PCR primers, targeted to specific loci in the human genome, which can enhance the reliability of DNA-based forensic identifications by, for example, providing another “identification marker” (i.e. another DNA sequence that is unique to a particular individual). As mentioned above, actual base sequence information can be used for identification as an accurate alternative to patterns formed by restriction enzyme generated fragments. Sequences targeted to noncoding regions of SEQ ID NO:31 are particularly appropriate for this use as greater numbers of polymorphisms occur in the noncoding regions, making it easier to differentiate individuals using this technique. Examples of polynucleotide reagents include the IC47611 nucleotide sequences or portions thereof, e.g., fragments derived from the noncoding regions of SEQ ID NO:31 having a length of at least bases, preferably at least 30 bases.

[1445] The IC47611 nucleotide sequences described herein can further be used to provide polynucleotide reagents, e.g., labeled or labelable probes which can be used in, for example, an in situ hybridization technique, to identify a specific tissue, e.g., thymus or brain tissue. This can be very useful in cases where a forensic pathologist is presented with a tissue of unknown origin. Panels of such IC47611 probes can be used to identify tissue by species and/or by organ type.

[1446] In a similar fashion, these reagents, e.g., IC47611 primers or probes can be used to screen tissue culture for contamination (i.e. screen for the presence of a mixture of different types of cells in a culture).

[1447] C. Predictive Medicine:

[1448] The present invention also pertains to the field of predictive medicine in which diagnostic assays, prognostic assays, and monitoring clinical trials are used for prognostic (predictive) purposes to thereby treat an individual prophylactically. Accordingly, one aspect of the present invention relates to diagnostic assays for determining IC47611 protein and/or nucleic acid expression as well as IC47611 activity, in the context of a biological sample (e.g., blood, serum, cells, tissue) to thereby determine whether an individual is afflicted with a disease or disorder, or is at risk of developing a disorder, associated with aberrant or unwanted IC47611 expression or activity. The invention also provides for prognostic (or predictive) assays for determining whether an individual is at risk of developing a disorder associated with IC47611 protein, nucleic acid expression or activity. For example, mutations in an IC47611 gene can be assayed in a biological sample. Such assays can be used for prognostic or predictive purpose to thereby prophylactically treat an individual prior to the onset of a disorder characterized by or associated with IC47611 protein, nucleic acid expression or activity.

[1449] Another aspect of the invention pertains to monitoring the influence of agents (e.g., drugs, compounds) on the expression or activity of IC47611 in clinical trials.

[1450] These and other agents are described in further detail in the following sections.

[1451] 1. Diagnostic Assays

[1452] An exemplary method for detecting the presence or absence of IC47611 protein or nucleic acid in a biological sample involves obtaining a biological sample from a test subject and contacting the biological sample with a compound or an agent capable of detecting IC47611 protein or nucleic acid (e.g., mRNA, or genomic DNA) that encodes IC47611 protein such that the presence of IC47611 protein or nucleic acid is detected in the biological sample. A preferred agent for detecting IC47611 mRNA or genomic DNA is a labeled nucleic acid probe capable of hybridizing to IC47611 mRNA or genomic DNA. The nucleic acid probe can be, for example, the IC47611 nucleic acid set forth in SEQ ID NO:31 or 33, or the DNA insert of the plasmid deposited with ATCC as Accession Number ______, or a portion thereof, such as an oligonucleotide of at least 15, 30, 50, 100, 250 or 500 nucleotides in length and sufficient to specifically hybridize under stringent conditions to IC47611 mRNA or genomic DNA. Other suitable probes for use in the diagnostic assays of the invention are described herein.

[1453] A preferred agent for detecting IC47611 protein is an antibody capable of binding to IC47611 protein, preferably an antibody with a detectable label. Antibodies can be polyclonal, or more preferably, monoclonal. An intact antibody, or a fragment thereof (e.g., Fab or F(ab′)₂) can be used. The term “labeled”, with regard to the probe or antibody, is intended to encompass direct labeling of the probe or antibody by coupling (i.e., physically linking) a detectable substance to the probe or antibody, as well as indirect labeling of the probe or antibody by reactivity with another reagent that is directly labeled. Examples of indirect labeling include detection of a primary antibody using a fluorescently labeled secondary antibody and end-labeling of a DNA probe with biotin such that it can be detected with fluorescently labeled streptavidin. The term “biological sample” is intended to include tissues, cells and biological fluids isolated from a subject, as well as tissues, cells and fluids present within a subject. That is, the detection method of the invention can be used to detect IC47611 mRNA, protein, or genomic DNA in a biological sample in vitro as well as in vivo. For example, in vitro techniques for detection of IC47611 mRNA include Northern hybridizations and in situ hybridizations. In vitro techniques for detection of IC47611 protein include enzyme linked immunosorbent assays (ELISAs), Western blots, immunoprecipitations and immunofluorescence. In vitro techniques for detection of IC47611 genomic DNA include Southern hybridizations. Furthermore, in vivo techniques for detection of IC47611 protein include introducing into a subject a labeled anti-IC47611 antibody. For example, the antibody can be labeled with a radioactive marker whose presence and location in a subject can be detected by standard imaging techniques.

[1454] In one embodiment, the biological sample contains protein molecules from the test subject. Alternatively, the biological sample can contain mRNA molecules from the test subject or genomic DNA molecules from the test subject. A preferred biological sample is a serum sample isolated by conventional means from a subject.

[1455] In another embodiment, the methods further involve obtaining a control biological sample from a control subject, contacting the control sample with a compound or agent capable of detecting IC47611 protein, mRNA, or genomic DNA, such that the presence of IC47611 protein, mRNA or genomic DNA is detected in the biological sample, and comparing the presence of IC47611 protein, mRNA or genomic DNA in the control sample with the presence of IC47611 protein, mRNA or genomic DNA in the test sample.

[1456] The invention also encompasses kits for detecting the presence of IC47611 in a biological sample. For example, the kit can comprise a labeled compound or agent capable of detecting IC47611 protein or mRNA in a biological sample; means for determining the amount of IC47611 in the sample; and means for comparing the amount of IC47611 in the sample with a standard. The compound or agent can be packaged in a suitable container. The kit can further comprise instructions for using the kit to detect IC47611 protein or nucleic acid.

[1457] 2. Prognostic Assays

[1458] The diagnostic methods described herein can furthermore be utilized to identify subjects having or at risk of developing a disease or disorder associated with aberrant or unwanted IC47611 expression or activity. As used herein, the term “aberrant” includes an IC47611 expression or activity which deviates from the wild type IC47611 expression or activity. Aberrant expression or activity includes increased or decreased expression or activity, as well as expression or activity which does not follow the wild type developmental pattern of expression or the subcellular pattern of expression. For example, aberrant IC47611 expression or activity is intended to include the cases in which a mutation in the IC47611 gene causes the IC47611 gene to be under-expressed or over-expressed and situations in which such mutations result in a non-functional IC47611 protein or a protein which does not function in a wild-type fashion, e.g., a protein which does not interact with an IC47611 substrate, e.g., a non-IC47611 channel subunit or ligand, or one which interacts with a non-IC47611 substrate, e.g. a non-IC47611 channel subunit or ligand. As used herein, the term “unwanted” includes an unwanted phenomenon involved in a biological response such as cellular proliferation. For example, the term unwanted includes an IC47611 expression or activity which is undesirable in a subject.

[1459] The assays described herein, such as the preceding diagnostic assays or the following assays, can be utilized to identify a subject having or at risk of developing a disorder associated with a misregulation in IC47611 protein activity or nucleic acid expression, such as a CNS disorder (e.g., a cognitive or neurodegenerative disorder), a pain disorder, a muscular disorder, a cellular proliferation, growth, differentiation, or migration disorder, or a cardiovascular disorder. Alternatively, the prognostic assays can be utilized to identify a subject having or at risk for developing a disorder associated with a misregulation in IC47611 protein activity or nucleic acid expression, such as a CNS disorder, a pain disorder, a cellular proliferation, growth, differentiation, or migration disorder, a muscular disorder, or a cardiovascular disorder. Thus, the present invention provides a method for identifying a disease or disorder associated with aberrant or unwanted IC47611 expression or activity in which a test sample is obtained from a subject and IC47611 protein or nucleic acid (e.g., mRNA or genomic DNA) is detected, wherein the presence of IC47611 protein or nucleic acid is diagnostic for a subject having or at risk of developing a disease or disorder associated with aberrant or unwanted IC47611 expression or activity. As used herein, a “test sample” refers to a biological sample obtained from a subject of interest. For example, a test sample can be a biological fluid (e.g., cerebrospinal fluid or serum), cell sample, or tissue.

[1460] Furthermore, the prognostic assays described herein can be used to determine whether a subject can be administered an agent (e.g., an agonist, antagonist, peptidomimetic, protein, peptide, nucleic acid, small molecule, or other drug candidate) to treat a disease or disorder associated with aberrant or unwanted IC47611 expression or activity. For example, such methods can be used to determine whether a subject can be effectively treated with an agent for a CNS disorder, a pain disorder, a muscular disorder, a cardiovascular disorder, or a cellular proliferation, growth, differentiation, or migration disorder. Thus, the present invention provides methods for determining whether a subject can be effectively treated with an agent for a disorder associated with aberrant or unwanted IC47611 expression or activity in which a test sample is obtained and IC47611 protein or nucleic acid expression or activity is detected (e.g., wherein the abundance of IC47611 protein or nucleic acid expression or activity is diagnostic for a subject that can be administered the agent to treat a disorder associated with aberrant or unwanted IC47611 expression or activity).

[1461] The methods of the invention can also be used to detect genetic alterations in an IC47611 gene, thereby determining if a subject with the altered gene is at risk for a disorder characterized by misregulation in IC47611 protein activity or nucleic acid expression, such as a CNS disorder, a pain disorder, a cellular proliferation, growth, differentiation, or migration disorder, a muscular disorder, or cardiovascular disorder. In preferred embodiments, the methods include detecting, in a sample of cells from the subject, the presence or absence of a genetic alteration characterized by at least one of an alteration affecting the integrity of a gene encoding an IC47611-protein, or the mis-expression of the IC47611 gene. For example, such genetic alterations can be detected by ascertaining the existence of at least one of 1) a deletion of one or more nucleotides from an IC47611 gene; 2) an addition of one or more nucleotides to an IC47611 gene; 3) a substitution of one or more nucleotides of an IC47611 gene, 4) a chromosomal rearrangement of an IC47611 gene; 5) an alteration in the level of a messenger RNA transcript of an IC47611 gene, 6) aberrant modification of an IC47611 gene, such as of the methylation pattern of the genomic DNA, 7) the presence of a non-wild type splicing pattern of a messenger RNA transcript of an IC47611 gene, 8) a non-wild type level of an IC47611-protein, 9) allelic loss of an IC47611 gene, and 10) inappropriate post-translational modification of an IC47611-protein. As described herein, there are a large number of assays known in the art which can be used for detecting alterations in an IC47611 gene. A preferred biological sample is a tissue or serum sample isolated by conventional means from a subject.

[1462] In certain embodiments, detection of the alteration involves the use of a probe/primer in a polymerase chain reaction (PCR) (see, e.g., U.S. Pat. Nos. 4,683,195 and 4,683,202), such as anchor PCR or RACE PCR, or, alternatively, in a ligation chain reaction (LCR) (see, e.g., Landegran et al. (1988) Science 241:1077-1080; and Nakazawa et al. (1994) Proc. Natl. Acad. Sci. USA 91:360-364), the latter of which can be particularly useful for detecting point mutations in the IC47611-gene (see Abravaya et al. (1995) Nucleic Acids Res. 23:675-682). This method can include the steps of collecting a sample of cells from a subject, isolating nucleic acid (e.g., genomic, mRNA or both) from the cells of the sample, contacting the nucleic acid sample with one or more primers which specifically hybridize to an IC47611 gene under conditions such that hybridization and amplification of the IC47611-gene (if present) occurs, and detecting the presence or absence of an amplification product, or detecting the size of the amplification product and comparing the length to a control sample. It is anticipated that PCR and/or LCR may be desirable to use as a preliminary amplification step in conjunction with any of the techniques used for detecting mutations described herein.

[1463] Alternative amplification methods include: self sustained sequence replication (Guatelli, J. C. et al., (1990) Proc. Natl Acad. Sci. USA 87:1874-1878), transcriptional amplification system (Kwoh, D. Y. et al., (1989) Proc. Natl. Acad. Sci. USA 86:1173-1177), Q-Beta Replicase (Lizardi, P. M. et al. (1988) Bio-Technology 6:1197), or any other nucleic acid amplification method, followed by the detection of the amplified molecules using techniques well known to those of skill in the art. These detection schemes are especially useful for the detection of nucleic acid molecules if such molecules are present in very low numbers.

[1464] In an alternative embodiment, mutations in an IC47611 gene from a sample cell can be identified by alterations in restriction enzyme cleavage patterns. For example, sample and control DNA is isolated, amplified (optionally), digested with one or more restriction endonucleases, and fragment length sizes are determined by gel electrophoresis and compared. Differences in fragment length sizes between sample and control DNA indicates mutations in the sample DNA. Moreover, the use of sequence specific ribozymes (see, for example, U.S. Pat. No. 5,498,531) can be used to score for the presence of specific mutations by development or loss of a ribozyme cleavage site.

[1465] In other embodiments, genetic mutations in IC47611 can be identified by hybridizing a sample and control nucleic acids, e.g., DNA or RNA, to high density arrays containing hundreds or thousands of oligonucleotides probes (Cronin, M. T. et al. (1996) Human Mutation 7: 244-255; Kozal, M. J. et al. (1996) Nature Medicine 2: 753-759). For example, genetic mutations in IC47611 can be identified in two dimensional arrays containing light-generated DNA probes as described in Cronin, M. T. et al. supra. Briefly, a first hybridization array of probes can be used to scan through long stretches of DNA in a sample and control to identify base changes between the sequences by making linear arrays of sequential overlapping probes. This step allows the identification of point mutations. This step is followed by a second hybridization array that allows the characterization of specific mutations by using smaller, specialized probe arrays complementary to all variants or mutations detected. Each mutation array is composed of parallel probe sets, one complementary to the wild-type gene and the other complementary to the mutant gene.

[1466] In yet another embodiment, any of a variety of sequencing reactions known in the art can be used to directly sequence the IC47611 gene and detect mutations by comparing the sequence of the sample IC47611 with the corresponding wild-type (control) sequence. Examples of sequencing reactions include those based on techniques developed by Maxam and Gilbert ((1977) Proc. Natl. Acad. Sci. USA 74:560) or Sanger ((1977) Proc. Natl. Acad. Sci. USA 74:5463). It is also contemplated that any of a variety of automated sequencing procedures can be utilized when performing the diagnostic assays ((1995) Biotechniques 19:448), including sequencing by mass spectrometry (see, e.g., PCT International Publication No. WO 94/16101; Cohen et al. (1996) Adv. Chromatogr. 36:127-162; and Griffin et al. (1993) Appl. Biochem. Biotechnol. 38:147-159).

[1467] Other methods for detecting mutations in the IC47611 gene include methods in which protection from cleavage agents is used to detect mismatched bases in RNA/RNA or RNA/DNA heteroduplexes (Myers et al. (1985) Science 230:1242). In general, the art technique of “mismatch cleavage” starts by providing heteroduplexes of formed by hybridizing (labeled) RNA or DNA containing the wild-type IC47611 sequence with potentially mutant RNA or DNA obtained from a tissue sample. The double-stranded duplexes are treated with an agent which cleaves single-stranded regions of the duplex such as which will exist due to basepair mismatches between the control and sample strands. For instance, RNA/DNA duplexes can be treated with RNase and DNA/DNA hybrids treated with S1 nuclease to enzymatically digesting the mismatched regions. In other embodiments, either DNA/DNA or RNA/DNA duplexes can be treated with hydroxylamine or osmium tetroxide and with piperidine in order to digest mismatched regions. After digestion of the mismatched regions, the resulting material is then separated by size on denaturing polyacrylamide gels to determine the site of mutation. See, for example, Cotton et al. (1988) Proc. Natl. Acad. Sci. USA 85:4397; Saleeba et al. (1992) Methods Enzymol. 217:286-295. In a preferred embodiment, the control DNA or RNA can be labeled for detection.

[1468] In still another embodiment, the mismatch cleavage reaction employs one or more proteins that recognize mismatched base pairs in double-stranded DNA (so called “DNA mismatch repair” enzymes) in defined systems for detecting and mapping point mutations in IC47611 cDNAs obtained from samples of cells. For example, the mutY enzyme of E. coli cleaves A at G/A mismatches and the thymidine DNA glycosylase from HeLa cells cleaves T at G/T mismatches (Hsu et al. (1994) Carcinogenesis 15:1657-1662). According to an exemplary embodiment, a probe based on an IC47611 sequence, e.g., a wild-type IC47611 sequence, is hybridized to a cDNA or other DNA product from a test cell(s). The duplex is treated with a DNA mismatch repair enzyme, and the cleavage products, if any, can be detected from electrophoresis protocols or the like. See, for example, U.S. Pat. No. 5,459,039.

[1469] In other embodiments, alterations in electrophoretic mobility will be used to identify mutations in IC47611 genes. For example, single strand conformation polymorphism (SSCP) may be used to detect differences in electrophoretic mobility between mutant and wild type nucleic acids (Orita et al. (1989) Proc Natl. Acad. Sci USA: 86:2766, see also Cotton (1993) Mutat. Res. 285:125-144; and Hayashi (1992) Genet. Anal. Tech. Appl. 9:73-79). Single-stranded DNA fragments of sample and control IC47611 nucleic acids will be denatured and allowed to renature. The secondary structure of single-stranded nucleic acids varies according to sequence, the resulting alteration in electrophoretic mobility enables the detection of even a single base change. The DNA fragments may be labeled or detected with labeled probes. The sensitivity of the assay may be enhanced by using RNA (rather than DNA), in which the secondary structure is more sensitive to a change in sequence. In a preferred embodiment, the subject method utilizes heteroduplex analysis to separate double stranded heteroduplex molecules on the basis of changes in electrophoretic mobility (Keen et al. (1991) Trends Genet 7:5).

[1470] In yet another embodiment the movement of mutant or wild-type fragments in polyacrylamide gels containing a gradient of denaturant is assayed using denaturing gradient gel electrophoresis (DGGE) (Myers et al. (1985) Nature 313:495). When DGGE is used as the method of analysis, DNA will be modified to insure that it does not completely denature, for example by adding a GC clamp of approximately 40 bp of high-melting GC-rich DNA by PCR. In a further embodiment, a temperature gradient is used in place of a denaturing gradient to identify differences in the mobility of control and sample DNA (Rosenbaum and Reissner (1987) Biophys Chem 265:12753).

[1471] Examples of other techniques for detecting point mutations include, but are not limited to, selective oligonucleotide hybridization, selective amplification, or selective primer extension. For example, oligonucleotide primers may be prepared in which the known mutation is placed centrally and then hybridized to target DNA under conditions which permit hybridization only if a perfect match is found (Saiki et al. (1986) Nature 324:163); Saiki et al. (1989) Proc. Natl. Acad. Sci. USA 86:6230). Such allele specific oligonucleotides are hybridized to PCR amplified target DNA or a number of different mutations when the oligonucleotides are attached to the hybridizing membrane and hybridized with labeled target DNA.

[1472] Alternatively, allele specific amplification technology which depends on selective PCR amplification may be used in conjunction with the instant invention. Oligonucleotides used as primers for specific amplification may carry the mutation of interest in the center of the molecule (so that amplification depends on differential hybridization) (Gibbs et al. (1989) Nucleic Acids Res. 17:2437-2448) or at the extreme 3′ end of one primer where, under appropriate conditions, mismatch can prevent, or reduce polymerase extension (Prossner (1993) Tibtech 11:238). In addition it may be desirable to introduce a novel restriction site in the region of the mutation to create cleavage-based detection (Gasparini et al. (1992) Mol. Cell Probes 6:1). It is anticipated that in certain embodiments amplification may also be performed using Taq ligase for amplification (Barany (1991) Proc. Natl. Acad. Sci USA 88:189). In such cases, ligation will occur only if there is a perfect match at the 3′ end of the 5′ sequence making it possible to detect the presence of a known mutation at a specific site by looking for the presence or absence of amplification.

[1473] The methods described herein may be performed, for example, by utilizing pre-packaged diagnostic kits comprising at least one probe nucleic acid or antibody reagent described herein, which may be conveniently used, e.g., in clinical settings to diagnose patients exhibiting symptoms or family history of a disease or illness involving an IC47611 gene.

[1474] Furthermore, any cell type or tissue in which IC47611 is expressed may be utilized in the prognostic assays described herein.

[1475] 3. Monitoring of Effects During Clinical Trials

[1476] Monitoring the influence of agents (e.g., drugs) on the expression or activity of an IC47611 protein (e.g., the modulation of cell proliferation and/or migration) can be applied not only in basic drug screening, but also in clinical trials. For example, the effectiveness of an agent determined by a screening assay as described herein to increase IC47611 gene expression, protein levels, or upregulate IC47611 activity, can be monitored in clinical trials of subjects exhibiting decreased IC47611 gene expression, protein levels, or downregulated IC47611 activity. Alternatively, the effectiveness of an agent determined by a screening assay to decrease IC47611 gene expression, protein levels, or downregulate IC47611 activity, can be monitored in clinical trials of subjects exhibiting increased IC47611 gene expression, protein levels, or upregulated IC47611 activity. In such clinical trials, the expression or activity of an IC47611 gene, and preferably, other genes that have been implicated in, for example, an IC47611-associated disorder can be used as a “read out” or markers of the phenotype of a particular cell.

[1477] For example, and not by way of limitation, genes, including IC47611, that are modulated in cells by treatment with an agent (e.g., compound, drug or small molecule) which modulates IC47611 activity (e.g., identified in a screening assay as described herein) can be identified. Thus, to study the effect of agents on IC47611-associated disorders (e.g., disorders characterized by deregulated cell proliferation and/or migration), for example, in a clinical trial, cells can be isolated and RNA prepared and analyzed for the levels of expression of IC47611 and other genes implicated in the IC47611-associated disorder, respectively. The levels of gene expression (e.g., a gene expression pattern) can be quantified by northern blot analysis or RT-PCR, as described herein, or alternatively by measuring the amount of protein produced, by one of the methods as described herein, or by measuring the levels of activity of IC47611 or other genes. In this way, the gene expression pattern can serve as a marker, indicative of the physiological response of the cells to the agent. Accordingly, this response state may be determined before, and at various points during treatment of the individual with the agent.

[1478] In a preferred embodiment, the present invention provides a method for monitoring the effectiveness of treatment of a subject with an agent (e.g., an agonist, antagonist, peptidomimetic, protein, peptide, nucleic acid, small molecule, or other drug candidate identified by the screening assays described herein) including the steps of (i) obtaining a pre-administration sample from a subject prior to administration of the agent; (ii) detecting the level of expression of an IC47611 protein, mRNA, or genomic DNA in the preadministration sample; (iii) obtaining one or more post-administration samples from the subject; (iv) detecting the level of expression or activity of the IC47611 protein, mRNA, or genomic DNA in the post-administration samples; (v) comparing the level of expression or activity of the IC47611 protein, mRNA, or genomic DNA in the pre-administration sample with the IC47611 protein, mRNA, or genomic DNA in the post administration sample or samples; and (vi) altering the administration of the agent to the subject accordingly. For example, increased administration of the agent may be desirable to increase the expression or activity of IC47611 to higher levels than detected, i.e., to increase the effectiveness of the agent. Alternatively, decreased administration of the agent may be desirable to decrease expression or activity of IC47611 to lower levels than detected, i.e. to decrease the effectiveness of the agent. According to such an embodiment, IC47611 expression or activity may be used as an indicator of the effectiveness of an agent, even in the absence of an observable phenotypic response.

[1479] D. Methods of Treatment:

[1480] The present invention provides for both prophylactic and therapeutic methods of treating a subject at risk of (or susceptible to) a disorder or having a disorder associated with aberrant or unwanted IC47611 expression or activity, e.g. a CNS disorder, a pain disorder, a cellular proliferation, growth, differentiation, or migration disorder, a muscular disorder, or a cardiovascular disorder. As used herein, “treatment” of a subject includes the application or administration of a therapeutic agent to a subject, or application or administration of a therapeutic agent to a cell or tissue from a subject, who has a diseases or disorder, has a symptom of a disease or disorder, or is at risk of (or susceptible to) a disease or disorder, with the purpose to cure, heal, alleviate, relieve, alter, remedy, ameliorate, improve, or affect the disease or disorder, the symptom of the disease or disorder, or the risk of (or susceptibility to) the disease or disorder. As used herein, a “therapeutic agent” includes, but is not limited to, small molecules, peptides, polypeptides, antibodies, ribozymes, and antisense oligonucleotides.

[1481] With regards to both prophylactic and therapeutic methods of treatment, such treatments may be specifically tailored or modified, based on knowledge obtained from the field of pharmacogenomics. “Pharmacogenomics”, as used herein, refers to the application of genomics technologies such as gene sequencing, statistical genetics, and gene expression analysis to drugs in clinical development and on the market. More specifically, the term refers the study of how a patient's genes determine his or her response to a drug (e.g., a patient's “drug response phenotype”, or “drug response genotype”). Thus, another aspect of the invention provides methods for tailoring an individual's prophylactic or therapeutic treatment with either the IC47611 molecules of the present invention or IC47611 modulators according to that individual's drug response genotype. Pharmacogenomics allows a clinician or physician to target prophylactic or therapeutic treatments to patients who will most benefit from the treatment and to avoid treatment of patients who will experience toxic drug-related side effects.

[1482] 1. Prophylactic Methods

[1483] In one aspect, the invention provides a method for preventing in a subject, a disease or condition associated with an aberrant or unwanted IC47611 expression or activity, by administering to the subject an IC47611 or an agent which modulates IC47611 expression or at least one IC47611 activity. Subjects at risk for a disease which is caused or contributed to by aberrant or unwanted IC47611 expression or activity can be identified by, for example, any or a combination of diagnostic or prognostic assays as described herein. Administration of a prophylactic agent can occur prior to the manifestation of symptoms characteristic of the IC47611 aberrancy, such that a disease or disorder is prevented or, alternatively, delayed in its progression. Depending on the type of IC47611 aberrancy, for example, an IC47611, IC47611 agonist or IC47611 antagonist agent can be used for treating the subject. The appropriate agent can be determined based on screening assays described herein.

[1484] 2. Therapeutic Methods

[1485] Another aspect of the invention pertains to methods of modulating IC47611 expression or activity for therapeutic purposes. Accordingly, in an exemplary embodiment, the modulatory method of the invention involves contacting a cell with an IC47611 or agent that modulates one or more of the activities of IC47611 protein activity associated with the cell. An agent that modulates IC47611 protein activity can be an agent as described herein, such as a nucleic acid or a protein, a naturally-occurring target molecule of an IC47611 protein (e.g., an IC47611 substrate), an IC47611 antibody, an IC47611 agonist or antagonist, a peptidomimetic of an IC47611 agonist or antagonist, or other small molecule. In one embodiment, the agent stimulates one or more IC47611 activities. Examples of such stimulatory agents include active IC47611 protein and a nucleic acid molecule encoding IC47611 that has been introduced into the cell. In another embodiment, the agent inhibits one or more IC47611 activities. Examples of such inhibitory agents include antisense IC47611 nucleic acid molecules, anti-IC47611 antibodies, and IC47611 inhibitors. These modulatory methods can be performed in vitro (e.g., by culturing the cell with the agent) or, alternatively, in vivo (e.g., by administering the agent to a subject). As such, the present invention provides methods of treating an individual afflicted with a disease or disorder characterized by aberrant or unwanted expression or activity of an IC47611 protein or nucleic acid molecule. In one embodiment, the method involves administering an agent (e.g., an agent identified by a screening assay described herein), or combination of agents that modulates (e.g., upregulates or downregulates) IC47611 expression or activity. In another embodiment, the method involves administering an IC47611 protein or nucleic acid molecule as therapy to compensate for reduced, aberrant, or unwanted IC47611 expression or activity.

[1486] Stimulation of IC47611 activity is desirable in situations in which IC47611 is abnormally downregulated and/or in which increased IC47611 activity is likely to have a beneficial effect. Likewise, inhibition of IC47611 activity is desirable in situations in which IC47611 is abnormally upregulated and/or in which decreased IC47611 activity is likely to have a beneficial effect.

[1487] 3. Pharmacogenomics

[1488] The IC47611 molecules of the present invention, as well as agents, or modulators which have a stimulatory or inhibitory effect on IC47611 activity (e.g., IC47611 gene expression) as identified by a screening assay described herein can be administered to individuals to treat (prophylactically or therapeutically) IC47611-associated disorders (e.g., proliferative disorders) associated with aberrant or unwanted IC47611 activity. In conjunction with such treatment, pharmacogenomics (i.e., the study of the relationship between an individual's genotype and that individual's response to a foreign compound or drug) may be considered. Differences in metabolism of therapeutics can lead to severe toxicity or therapeutic failure by altering the relation between dose and blood concentration of the pharmacologically active drug. Thus, a physician or clinician may consider applying knowledge obtained in relevant pharmacogenomics studies in determining whether to administer an IC47611 molecule or IC47611 modulator as well as tailoring the dosage and/or therapeutic regimen of treatment with an IC47611 molecule or IC47611 modulator.

[1489] Pharmacogenomics deals with clinically significant hereditary variations in the response to drugs due to altered drug disposition and abnormal action in affected persons. See, for example, Eichelbaum, M. et al. (1996) Clin. Exp. Pharmacol. Physiol. 23(10-11): 983-985 and Linder, M. W. et al. (1997) Clin. Chem. 43(2): 254-266. In general, two types of pharmacogenetic conditions can be differentiated. Genetic conditions transmitted as a single factor altering the way drugs act on the body (altered drug action) or genetic conditions transmitted as single factors altering the way the body acts on drugs (altered drug metabolism). These pharmacogenetic conditions can occur either as rare genetic defects or as naturally-occurring polymorphisms. For example, glucose-6-phosphate dehydrogenase deficiency (G6PD) is a common inherited enzymopathy in which the main clinical complication is haemolysis after ingestion of oxidant drugs (anti-malarials, sulfonamides, analgesics, nitrofurans) and consumption of fava beans.

[1490] One pharmacogenomics approach to identifying genes that predict drug response, known as “a genome-wide association”, relies primarily on a high-resolution map of the human genome consisting of already known gene-related markers (e.g., a “bi-allelic” gene marker map which consists of 60,000-100,000 polymorphic or variable sites on the human genome, each of which has two variants.) Such a high-resolution genetic map can be compared to a map of the genome of each of a statistically significant number of patients taking part in a Phase II/III drug trial to identify markers associated with a particular observed drug response or side effect. Alternatively, such a high resolution map can be generated from a combination of some ten-million known single nucleotide polymorphisms (SNPs) in the human genome. As used herein, a “SNP” is a common alteration that occurs in a single nucleotide base in a stretch of DNA. For example, a SNP may occur once per every 1000 bases of DNA. A SNP may be involved in a disease process, however, the vast majority may not be disease-associated. Given a genetic map based on the occurrence of such SNPs, individuals can be grouped into genetic categories depending on a particular pattern of SNPs in their individual genome. In such a manner, treatment regimens can be tailored to groups of genetically similar individuals, taking into account traits that may be common among such genetically similar individuals.

[1491] Alternatively, a method termed the “candidate gene approach”, can be utilized to identify genes that predict drug response. According to this method, if a gene that encodes a drugs target is known (e.g., an IC47611 protein of the present invention), all common variants of that gene can be fairly easily identified in the population and it can be determined if having one version of the gene versus another is associated with a particular drug response.

[1492] As an illustrative embodiment, the activity of drug metabolizing enzymes is a major determinant of both the intensity and duration of drug action. The discovery of genetic polymorphisms of drug metabolizing enzymes (e.g., N-acetyltransferase 2 (NAT 2) and cytochrome P450 enzymes CYP2D6 and CYP2C19) has provided an explanation as to why some patients do not obtain the expected drug effects or show exaggerated drug response and serious toxicity after taking the standard and safe dose of a drug. These polymorphisms are expressed in two phenotypes in the population, the extensive metabolizer (EM) and poor metabolizer (PM). The prevalence of PM is different among different populations. For example, the gene coding for CYP2D6 is highly polymorphic and several mutations have been identified in PM, which all lead to the absence of functional CYP2D6. Poor metabolizers of CYP2D6 and CYP2C19 quite frequently experience exaggerated drug response and side effects when they receive standard doses. If a metabolite is the active therapeutic moiety, PM show no therapeutic response, as demonstrated for the analgesic effect of codeine mediated by its CYP2D6-formed metabolite morphine. The other extreme is the so called ultra-rapid metabolizers who do not respond to standard doses. Recently, the molecular basis of ultra-rapid metabolism has been identified to be due to CYP2D6 gene amplification.

[1493] Alternatively, a method termed the “gene expression profiling”, can be utilized to identify genes that predict drug response. For example, the gene expression of an animal dosed with a drug (e.g., an IC47611 molecule or IC47611 modulator of the present invention) can give an indication whether gene pathways related to toxicity have been turned on.

[1494] Information generated from more than one of the above pharmacogenomics approaches can be used to determine appropriate dosage and treatment regimens for prophylactic or therapeutic treatment an individual. This knowledge, when applied to dosing or drug selection, can avoid adverse reactions or therapeutic failure and thus enhance therapeutic or prophylactic efficiency when treating a subject with an IC47611 molecule or IC47611 modulator, such as a modulator identified by one of the exemplary screening assays described herein.

[1495] E. Electronic Apparatus Readable Media and Arrays

[1496] Electronic apparatus readable media comprising IC47611 sequence information is also provided. As used herein, “IC47611 sequence information” refers to any nucleotide and/or amino acid sequence information particular to the IC47611 molecules of the present invention, including but not limited to full-length nucleotide and/or amino acid sequences, partial nucleotide and/or amino acid sequences, polymorphic sequences including single nucleotide polymorphisms (SNPs), epitope sequences, and the like. Moreover, information “related to” said IC47611 sequence information includes detection of the presence or absence of a sequence (e.g., detection of expression of a sequence, fragment, polymorphism, etc.), determination of the level of a sequence (e.g., detection of a level of expression, for example, a quantitative detection), detection of a reactivity to a sequence (e.g., detection of protein expression and/or levels, for example, using a sequence-specific antibody), and the like. As used herein, “electronic apparatus readable media” refers to any suitable medium for storing, holding, or containing data or information that can be read and accessed directly by an electronic apparatus. Such media can include, but are not limited to: magnetic storage media, such as floppy discs, hard disc storage medium, and magnetic tape; optical storage media such as compact discs; electronic storage media such as RAM, ROM, EPROM, EEPROM and the like; and general hard disks and hybrids of these categories such as magnetic/optical storage media. The medium is adapted or configured for having recorded thereon IC47611 sequence information of the present invention.

[1497] As used herein, the term “electronic apparatus” is intended to include any suitable computing or processing apparatus or other device configured or adapted for storing data or information. Examples of electronic apparatus suitable for use with the present invention include stand-alone computing apparatuses; networks, including a local area network (LAN), a wide area network (WAN) Internet, Intranet, and Extranet; electronic appliances such as a personal digital assistants (PDAs), cellular phone, pager and the like; and local and distributed processing systems.

[1498] As used herein, “recorded” refers to a process for storing or encoding information on the electronic apparatus readable medium. Those skilled in the art can readily adopt any of the presently known methods for recording information on known media to generate manufactures comprising the IC47611 sequence information. A variety of software programs and formats can be used to store the sequence information on the electronic apparatus readable medium. For example, the sequence information can be represented in a word processing text file, formatted in commercially-available software such as WordPerfect and Microsoft Word, represented in the form of an ASCII file, or stored in a database application, such as DB2, Sybase, Oracle, or the like, as well as in other forms. Any number of dataprocessor structuring formats (e.g., text file or database) may be employed in order to obtain or create a medium having recorded thereon the IC47611 sequence information.

[1499] By providing IC47611 sequence information in readable form, one can routinely access the sequence information for a variety of purposes. For example, one skilled in the art can use the sequence information in readable form to compare a target sequence or target structural motif with the sequence information stored within the data storage means. Search means are used to identify fragments or regions of the sequences of the invention which match a particular target sequence or target motif.

[1500] The present invention therefore provides a medium for holding instructions for performing a method for determining whether a subject has a IC47611 associated disease or disorder or a pre-disposition to a IC47611 associated disease or disorder, wherein the method comprises the steps of determining IC47611 sequence information associated with the subject and based on the IC47611 sequence information, determining whether the subject has a IC47611 associated disease or disorder or a pre-disposition to a IC47611 associated disease or disorder, and/or recommending a particular treatment for the disease, disorder, or pre-disease condition.

[1501] The present invention further provides in an electronic system and/or in a network, a method for determining whether a subject has a IC47611 associated disease or disorder or a pre-disposition to a disease associated with IC47611 wherein the method comprises the steps of determining IC47611 sequence information associated with the subject, and based on the IC47611 sequence information, determining whether the subject has a IC47611 associated disease or disorder or a pre-disposition to a IC47611 associated disease or disorder, and/or recommending a particular treatment for the disease, disorder or pre-disease condition. The method may further comprise the step of receiving phenotypic information associated with the subject and/or acquiring from a network phenotypic information associated with the subject.

[1502] The present invention also provides in a network, a method for determining whether a subject has a IC47611 associated disease or disorder or a pre-disposition to a IC47611 associated disease or disorder associated with IC47611, said method comprising the steps of receiving IC47611 sequence information from the subject and/or information related thereto, receiving phenotypic information associated with the subject, acquiring information from the network corresponding to IC47611 and/or a IC47611 associated disease or disorder, and based on one or more of the phenotypic information, the IC47611 information (e.g., sequence information and/or information related thereto), and the acquired information, determining whether the subject has a IC47611 associated disease or disorder or a pre-disposition to a IC47611 associated disease or disorder. The method may further comprise the step of recommending a particular treatment for the disease, disorder or pre-disease condition.

[1503] The present invention also provides a business method for determining whether a subject has a IC47611 associated disease or disorder or a pre-disposition to a IC47611 associated disease or disorder, said method comprising the steps of receiving information related to IC47611 (e.g., sequence information and/or information related thereto), receiving phenotypic information associated with the subject, acquiring information from the network related to IC47611 and/or related to a IC47611 associated disease or disorder, and based on one or more of the phenotypic information, the IC47611 information, and the acquired information, determining whether the subject has a IC47611 associated disease or disorder or a pre-disposition to a IC47611 associated disease or disorder. The method may further comprise the step of recommending a particular treatment for the disease, disorder or pre-disease condition.

[1504] The invention also includes an array comprising a IC47611 sequence of the present invention. The array can be used to assay expression of one or more genes in the array. In one embodiment, the array can be used to assay gene expression in a tissue to ascertain tissue specificity of genes in the array. In this manner, up to about 7600 genes can be simultaneously assayed for expression, one of which can be IC47611. This allows a profile to be developed showing a battery of genes specifically expressed in one or more tissues.

[1505] In addition to such qualitative determination, the invention allows the quantitation of gene expression. Thus, not only tissue specificity, but also the level of expression of a battery of genes in the tissue is ascertainable. Thus, genes can be grouped on the basis of their tissue expression per se and level of expression in that tissue. This is useful, for example, in ascertaining the relationship of gene expression between or among tissues. Thus, one tissue can be perturbed and the effect on gene expression in a second tissue can be determined. In this context, the effect of one cell type on another cell type in response to a biological stimulus can be determined. Such a determination is useful, for example, to know the effect of cell-cell interaction at the level of gene expression. If an agent is administered therapeutically to treat one cell type but has an undesirable effect on another cell type, the invention provides an assay to determine the molecular basis of the undesirable effect and thus provides the opportunity to co-administer a counteracting agent or otherwise treat the undesired effect. Similarly, even within a single cell type, undesirable biological effects can be determined at the molecular level. Thus, the effects of an agent on expression of other than the target gene can be ascertained and counteracted.

[1506] In another embodiment, the array can be used to monitor the time course of expression of one or more genes in the array. This can occur in various biological contexts, as disclosed herein, for example development of a IC47611 associated disease or disorder, progression of IC47611 associated disease or disorder, and processes, such a cellular transformation associated with the IC47611 associated disease or disorder.

[1507] The array is also useful for ascertaining the effect of the expression of a gene on the expression of other genes in the same cell or in different cells (e.g., ascertaining the effect of IC47611 expression on the expression of other genes). This provides, for example, for a selection of alternate molecular targets for therapeutic intervention if the ultimate or downstream target cannot be regulated.

[1508] The array is also useful for ascertaining differential expression patterns of one or more genes in normal and abnormal cells. This provides a battery of genes (e.g., including IC47611) that could serve as a molecular target for diagnosis or therapeutic intervention.

[1509] This invention is further illustrated by the following examples which should not be construed as limiting. The contents of all references, patents and published patent applications cited throughout this application, as well as the Figures and the Sequence Listing, are incorporated herein by reference.

### EXAMPLES

### Example 1

### Identification and Characterization of Human IC47611 cDNA

[1510] In this example, the identification and characterization of the gene encoding human IC47611 (clone Fbh47611FL) is described.

[1511] Isolation of the IC47611 cDNA

[1512] The invention is based, at least in part, on the discovery of a human gene encoding a novel protein, referred to herein as IC47611. The entire sequence of the human clone Fbh47611FL was determined and found to contain an open reading frame termed human “IC47611.” The nucleotide sequence of the human IC47611 gene is set forth in FIGS. 24A-C and in SEQ ID Nos:31 and 33. The amino acid sequence of the human IC47611 expression product is set forth in FIGS. 24A-C and in SEQ ID NO:32.

[1513] The nucleotide sequence encoding the human IC47611 protein is shown in FIGS. 24A-C and is set forth as SEQ ID NO:31. The protein encoded by this nucleic acid comprises about 453 amino acids and has the amino acid sequence shown in FIGS. 24A-C and set forth as SEQ ID NO:32. The coding region (open reading frame) of SEQ ID NO:31 is set forth as SEQ ID NO:33. Clone Fbh47611FL, comprising the coding region of human IC47611, was deposited with the American Type Culture Collection (ATCC®), 10801 University Boulevard, Manassas, Va. 20110-2209, on ______, and assigned Accession No. ______.

[1514] Analysis of the Human IC47611 Molecules

[1515] The amino acid sequence of human IC47611 was analyzed using the program PSORT (http://www.psort.nibb.ac.jp) to predict the localization of the proteins within the cell. This program assesses the presence of different targeting and localization amino acid sequences within the query sequence. The results of the analysis show that human IC47611 (SEQ ID NO:32) may be localized to the endoplasmic reticulum, to the mitochondrion, to the nucleus, or to secretory vesicles.

[1516] A search was performed against the Memsat database (FIG. 26), resulting in the identification of two transmembrane domains in the amino acid sequence of human IC47611 (SEQ ID NO:32) at about residues 108-132 and 180-204.

[1517] A search was also performed against the HMM database (FIG. 27) resulting in the identification of an inward-rectifier potassium channel (IRK) domain in the amino acid sequence of human IC47611 (SEQ ID NO:32) at about residues 72-399 (score=713.3).

[1518] A search was also performed against the ProDom database resulting in the identification of an inward-rectifier potassium channel (IRK) domain at about residues 74-403 (score=835), and an inward-rectifier potassium channel (IRK)-related domain at about residues 36-73 (score=185) of the amino acid sequence of human IC47611 (SEQ ID NO:32). The results of the search are set forth in FIG. 28.

[1519] Tissue Distribution of IC47611 mRNA

[1520] This example describes the tissue distribution of IC47611 mRNA, as is determined by Polymerase Chain Reaction (PCR) on cDNA libraries using oligonucleotide primers based on the human IC47611 sequence.

[1521] For in situ analysis, various tissues, e.g. tissues obtained from brain, are first frozen on dry ice. Ten-micrometer-thick sections of the tissues are postfixed with 4% formaldehyde in DEPC treated 1×phosphate-buffered saline at room temperature for 10 minutes before being rinsed twice in DEPC 1×phosphate-buffered saline and once in 0.1 M triethanolamine-HCl (pH 8.0). Following incubation in 0.25% acetic anhydride-0.1 M triethanolamine-HCl for 10 minutes, sections are rinsed in DEPC 2×SSC (1×SSC is 0.15M NaCl plus 0.015M sodium citrate). Tissue is then dehydrated through a series of ethanol washes, incubated in 100% chloroform for 5 minutes, and then rinsed in 100% ethanol for 1 minute and 95% ethanol for 1 minute and allowed to air dry.

[1522] Hybridizations are performed with ³⁵S-radiolabeled (5×10⁷ cpm/ml) cRNA probes. Probes are incubated in the presence of a solution containing 600 mM NaCl, 10 mM Tris (pH 7.5), 1 mM EDTA, 0.01% sheared salmon sperm DNA, 0.01% yeast tRNA, 0.05% yeast total RNA type X1, 1×Denhardt's solution, 50% formamide, 10% dextran sulfate, 100 mM dithiothreitol, 0.1% sodium dodecyl sulfate (SDS), and 0.1% sodium thiosulfate for 18 hours at 55° C.

[1523] After hybridization, slides are washed with 2×SSC. Sections are then sequentially incubated at 37° C. in TNE (a solution containing 10 mM Tris-HCl (pH 7.6), 500 mM NaCl, and 1 mM EDTA), for 10 minutes, in TNE with 10 μg of RNase A per ml for 30 minutes, and finally in TNE for 10 minutes. Slides are then rinsed with 2×SSC at room temperature, washed with 2×SSC at 50° C. for 1 hour, washed with 0.2×SSC at 55° C. for 1 hour, and 0.2×SSC at 60° C. for 1 hour. Sections are then dehydrated rapidly through serial ethanol-0.3 M sodium acetate concentrations before being air dried and exposed to Kodak Biomax MR scientific imaging film for 24 hours and subsequently dipped in NB-2 photoemulsion and exposed at 4° C. for 7 days before being developed and counter stained.

### Example 2

### Expression of Recombinant IC47611 Protein in Bacterial Cells

[1524] In this example, IC47611 is expressed as a recombinant glutathione-S-transferase (GST) fusion polypeptide in E. coli and the fusion polypeptide is isolated and characterized. Specifically, IC47611 is fused to GST and this fusion polypeptide is expressed in E. coli, e.g., strain PEB199. Expression of the GST-IC47611 fusion protein in PEB199 is induced with IPTG. The recombinant fusion polypeptide is purified from crude bacterial lysates of the induced PEB199 strain by affinity chromatography on glutathione beads. Using polyacrylamide gel electrophoretic analysis of the polypeptide purified from the bacterial lysates, the molecular weight of the resultant fusion polypeptide is determined.

### Example 3

### Expression of Recombinant IC47611 Protein in COS Cells

[1525] To express the IC47611 gene in COS cells, the pcDNA/Amp vector by Invitrogen Corporation (San Diego, Calif.) is used. This vector contains an SV40 origin of replication, an ampicillin resistance gene, an E. coli replication origin, a CMV promoter followed by a polylinker region, and an SV40 intron and polyadenylation site. A DNA fragment encoding the entire IC47611 protein and an HA tag (Wilson et al. (1984) Cell 37:767) or a FLAG tag fused in-frame to its 3′ end of the fragment is cloned into the polylinker region of the vector, thereby placing the expression of the recombinant protein under the control of the CMV promoter.

[1526] To construct the plasmid, the IC47611 DNA sequence is amplified by PCR using two primers. The 5′ primer contains the restriction site of interest followed by approximately twenty nucleotides of the IC47611 coding sequence starting from the initiation codon; the 3′ end sequence contains complementary sequences to the other restriction site of interest, a translation stop codon, the HA tag or FLAG tag and the last 20 nucleotides of the IC47611 coding sequence. The PCR amplified fragment and the pCDNA/Amp vector are digested with the appropriate restriction enzymes and the vector is dephosphorylated using the CIAP enzyme (New England Biolabs, Beverly, Mass.). Preferably the two restriction sites chosen are different so that the IC47611 gene is inserted in the correct orientation. The ligation mixture is transformed into E. coli cells (strains HB101, DH5α, SURE, available from Stratagene Cloning Systems, La Jolla, Calif., can be used), the transformed culture is plated on ampicillin media plates, and resistant colonies are selected. Plasmid DNA is isolated from transformants and examined by restriction analysis for the presence of the correct fragment.

[1527] COS cells are subsequently transfected with the IC47611-pcDNA/Amp plasmid DNA using the calcium phosphate or calcium chloride co-precipitation methods, DEAE-dextran-mediated transfection, lipofection, or electroporation. Other suitable methods for transfecting host cells can be found in Sambrook, J., Fritsh, E. F., and Maniatis, T. Molecular Cloning: A Laboratory Manual. 2nd, ed., Cold Spring Harbor Laboratory, Cold Spring Harbor Laboratory Press, Cold Spring Harbor, N.Y., 1989. The expression of the IC47611 polypeptide is detected by radiolabeling (³⁵S-methionine or ³⁵S-cysteine available from NEN, Boston, Mass., can be used) and immunoprecipitation (Harlow, E. and Lane, D. Antibodies: A Laboratory Manual, Cold Spring Harbor Laboratory Press, Cold Spring Harbor, N.Y., 1988) using an HA specific monoclonal antibody. Briefly, the cells are labeled for 8 hours with ³⁵S-methionine (or ³⁵S-cysteine). The culture media are then collected and the cells are lysed using detergents (RIPA buffer, 150 mM NaCl, 1% NP-40, 0.1% SDS, 0.5% DOC, 50 mM Tris, pH 7.5). Both the cell lysate and the culture media are precipitated with an HA specific monoclonal antibody. Precipitated polypeptides are then analyzed by SDS-PAGE.

[1528] Alternatively, DNA containing the IC47611 coding sequence is cloned directly into the polylinker of the pCDNA/Amp vector using the appropriate restriction sites. The resulting plasmid is transfected into COS cells in the manner described above, and the expression of the IC47611 polypeptide is detected by radiolabeling and immunoprecipitation using an IC47611 specific monoclonal antibody.

[1529] VI. 47615, A NOVEL HUMAN ION CHANNEL AND USES THEREOF

### Background of the Invention

[1530] The ion channel family of proteins is a large family of membrane-bound proteins responsible for a wide range of important transport and signaling functions in cells. The ion channel family includes at least three subfamilies: calcium ion channels (i.e., Ca channels), potassium channels (i.e., K channels) and sodium channels (Na channels). Members of the ion channel family are characterized by the presence of six (6) transmembrane helices in which the last two helices flank a loop which determines ion selectivity. In some subfamilies (e.g., Na channels) the domain is repeated four times, whereas in others (e.g., K channels) the protein forms as a tetramer in the membrane.

[1531] Calcium channel proteins are involved in the control of neurotransmitter release from neurons (Williams et al. (1992) Science 257:389-395), and play an important role in the regulation of a variety of cellular functions, including membrane excitability, muscle contraction and synaptic transmission (Mori et al. (1991) Nature 350:398-402). The calcium channel proteins are composed of four (4) tightly-coupled subunits (α1, α2, β and γ), the α1 subunit from each creating the pore for the import of extracellular calcium ions. The α1 subunit shares sequence characteristics with all voltage-dependent cation channels, and exploits the same 6-helix bundle structural motif. In both sodium and calcium channels, this motif is repeated 4 times within the sequence to give a 24-helix bundle. There are several tissue-specific pharmacologically and electrophysiologically distinct isoforms of calcium channels, coded for by separate genes in a multi-gene family. In skeletal muscle, each tightly-bound assembly of α, β and γ subunits associates with 4 others to form a pentameric macromolecule (Koch et al. (1990) J. Biol. Chem. 265:17786-17791). Examples of calcium channels include, but are not limited to, the low-voltage-gated channels and the high-voltage-gated channels. Calcium channels are described in, for example, Davila et al. (1999) Ann. N.Y. Acad. Sci. 868:102-17 and McEnery et al. (1998) J. Bioenergetics and Biomembranes 30(4):409-418, the contents of which are incorporated herein by reference.

[1532] Sodium channels are transmembrane (TM) voltage-dependent proteins responsible for the depolarizing phase of the action potential in most electrically excitable cells (George et al. (1992) Proc. Natl. Acad. Sci. USA 89:4893-4897). They may exist in 3 states (Noda et al. (1984) Nature 312:121-127): the resting state, where the channel is closed; the activated state, where the channel is open; and the inactivated state, where the channel is closed. Several different structurally and functionally distinct isoforms are found in mammals, coded for by a multigene family (Rogart et al. (1989) Proc. Natl. Acad. Sci. USA 86:8170-8174), these being responsible for the different types of sodium ion currents found in excitable tissues. The structure of sodium channels is based on 4 internal repeats of a 6-helix bundle (Noda et al. (1986) Nature 320:188-192) (in which 5 of the membrane-spanning segments are hydrophobic and the other is positively charged), forming a 24-helical bundle. The charged segments are believed to be localized within clusters formed by their 5 hydrophobic neighbors. It is postulated that the charged domain may be the voltage sensor region, possibly moving outward on depolarization, causing a conformational change. This model, proposed by (Noda et al. (1986) supra), contrasts with that of Sato and Matsumoto (1992) Biochem. Biophys. Res. Commun. 186:1158-1167), in which the TM segments are juxtaposed octagonally. The basic structural motif (the 6-helix bundle) is also found in potassium and calcium channels.

[1533] Potassium channels are the most diverse group of the ion channel family (possibly as a result of gene duplication and alternative splicing of the genes (Perney and Kaczmarek (1991) Curr. Opin. Cell. Biol. 3:663-670 and Luneau et al. (1991) FEBS Lett. 288:163-167). They are important in shaping the action potential, and in neuronal excitability and plasticity (Tempel et al. (1988) Nature 332:837-839). The potassium channel family is composed of several functionally distinct isoforms, which can be broadly separated into 2 groups (Stuehmer et al. (1989) EMBO J. 8:3225-3244). The first is the practically non-inactivating “delayed” group, the second the rapidly inactivating “transient” group. These are all highly similar proteins, with possibly only small amino acid changes causing the diversity of the voltage-dependent gating mechanism, channel conductance and toxin binding properties. Members of the potassium channel family vary in several ways. Some open in response to depolarization of the plasma membrane; others open in response to hyperpolarization or an increase in intracellular calcium concentration; some can be regulated by binding of a transmitter, together with intracellular kinases; and others are regulated by GTP-binding proteins or other second messengers (Schwarz et al. (1988) Nature 331:137-142 (1988). They are also involved in T-cell activation, and may have a role in target cell lysis by cytotoxic T-lymphocytes (Attali et al. (1992) J. Biol. Chem. 267:8650-8657 (1992). Potassium channels are transmembrane (TM) proteins that contain 6 membrane-spanning α-helical segments, 5 of which are hydrophobic, the other being positively charged. The charged segment is believed to be localized within a cluster formed by the hydrophobic helices. As with Na channels, it is postulated that the charged segment may constitute the voltage sensor region, possibly moving outward on depolarization, causing a conformational change. The 6-helix bundle is a common structural motif in sodium channels (in which it is repeated 4 times within the sequence to form a 24-helix bundle), and in calcium channels (where it also forms a 24-helix bundle, which itself is tightly bound to 3 different subunits).

[1534] Ion channels play a role in regulating ion transport and signaling in virtually every cell in the human body.

### Summary of the Invention

[1535] The present invention is based, at least in part, on the discovery of novel ion channel family members, referred to herein as ion channel 47615, or “IC47615” nucleic acid and protein molecules. The IC47615 molecules of the present invention are useful as targets for developing modulating agents to regulate a variety of cellular processes, including ion transport (e.g., ion conductance); membrane excitability and/or polarization; synaptic transmission; signal transduction; cell activation, proliferation, growth, differentiation and/or migration; and muscle contraction. Accordingly, in one aspect, this invention provides isolated nucleic acid molecules encoding IC47615 proteins or biologically active portions thereof, as well as nucleic acid fragments suitable as primers or hybridization probes for the detection of IC47615-encoding nucleic acids.

[1536] In one embodiment, an IC47615 nucleic acid molecule of the invention is at least 50%, 55%, 60%, 65%, 70%, 75%, 80%, 85%, 90%, 95%, 96%, 97%, 98%, 99%, 99.1%, 99.2%, 99.3%, 99.4%, 99.5%, 99.6%, 99.7%, 99.8%, 99.9% or more identical to the nucleotide sequence (e.g., to the entire length of the nucleotide sequence) shown in SEQ ID NO:34 or 36 or the nucleotide sequence of the DNA insert of the plasmid deposited with ATCC as Accession Number ______, or a complement thereof.

[1537] In a preferred embodiment, the isolated nucleic acid molecule includes the nucleotide sequence shown SEQ ID NO:34 or 36, or a complement thereof. In another embodiment, the nucleic acid molecule includes SEQ ID NO:36 and nucleotides 1-603 of SEQ ID NO:34. In yet another embodiment, the nucleic acid molecule includes SEQ ID NO:36 and nucleotides 1519-4003 of SEQ ID NO:34. In another preferred embodiment, the nucleic acid molecule consists of the nucleotide sequence shown in SEQ ID NO:34 or 36. In another preferred embodiment, the nucleic acid molecule includes a fragment of at least 50 nucleotides (e.g., 50 contiguous nucleotides) of the nucleotide sequence of SEQ ID NO:34 or 36, or a complement thereof.

[1538] In another embodiment, an IC47615 nucleic acid molecule includes a nucleotide sequence encoding a protein having an amino acid sequence sufficiently identical to the amino acid sequence of SEQ ID NO:35 or an amino acid sequence encoded by the DNA insert of the plasmid deposited with ATCC as Accession Number ______. In a preferred embodiment, an IC47615 nucleic acid molecule includes a nucleotide sequence encoding a protein having an amino acid sequence at least 50%, 55%, 60%, 65%, 70%, 75%, 80%, 85%, 90%, 95%, 96%, 97%, 98%, 99%, 99.1%, 99.2%, 99.3%, 99.4%, 99.5%, 99.6%, 99.7%, 99.8%, 99.9% or more identical to the entire length of the amino acid sequence of SEQ ID NO:35 or the amino acid sequence encoded by the DNA insert of the plasmid deposited with ATCC as Accession Number ______.

[1539] In another preferred embodiment, an isolated nucleic acid molecule encodes the amino acid sequence of human IC47615. In yet another preferred embodiment, the nucleic acid molecule includes a nucleotide sequence encoding a protein having the amino acid sequence of SEQ ID NO:35 or the amino acid sequence encoded by the DNA insert of the plasmid deposited with ATCC as Accession Number ______. In yet another preferred embodiment, the nucleic acid molecule is at least 50 nucleotides in length. In a further preferred embodiment, the nucleic acid molecule is at least 50 nucleotides in length and encodes a protein having an IC47615 activity (as described herein).

[1540] Another embodiment of the invention features nucleic acid molecules, preferably IC47615 nucleic acid molecules, which specifically detect IC47615 nucleic acid molecules relative to nucleic acid molecules encoding non-IC47615 proteins. For example, in one embodiment, such a nucleic acid molecule is at least 50-100, 100-200, 200-300, 300-400, 400-500, 500-600, 600-700, 700-800, 800-900, 900-1000, 1000-1100, 1100-1200, 1200-1300, 1300-1400, 1400-1500, 1500-1600, 1600-1700, 1700-1800, 1800-1900, 1900-2000, 2000-2100, 2100-2200, 2200-2300, 2300-2400, 2400-2500, 3000, 3500, 4000 or more nucleotides in length and hybridizes under stringent conditions to a nucleic acid molecule comprising the nucleotide sequence shown in SEQ ID NO:34, the nucleotide sequence of the DNA insert of the plasmid deposited with ATCC as Accession Number ______, or a complement thereof.

[1541] In preferred embodiments, the nucleic acid molecules are at least 15 (e.g., 15 contiguous) nucleotides in length and hybridize under stringent conditions to SEQ ID NO:34.

[1542] In other preferred embodiments, the nucleic acid molecule encodes a naturally occurring allelic variant of a polypeptide comprising the amino acid sequence of SEQ ID NO:35 or an amino acid sequence encoded by the DNA insert of the plasmid deposited with ATCC as Accession Number ______, wherein the nucleic acid molecule hybridizes to a complement of a nucleic acid molecule comprising SEQ ID NO:34 or 36 under stringent conditions.

[1543] Another embodiment of the invention provides an isolated nucleic acid molecule which is antisense to an IC47615 nucleic acid molecule, e.g., the coding strand of an IC47615 nucleic acid molecule.

[1544] Another aspect of the invention provides a vector comprising an IC47615 nucleic acid molecule. In certain embodiments, the vector is a recombinant expression vector. In another embodiment, the invention provides a host cell containing a vector of the invention. In yet another embodiment, the invention provides a host cell containing a nucleic acid molecule of the invention. The invention also provides a method for producing a protein, preferably an IC47615 protein, by culturing in a suitable medium, a host cell, e.g., a mammalian host cell such as a non-human mammalian cell, of the invention containing a recombinant expression vector, such that the protein is produced.

[1545] Another aspect of this invention features isolated or recombinant IC47615 proteins and polypeptides. In one embodiment, an isolated IC47615 protein has a transmembrane domain. In a preferred embodiment, an IC47615 protein includes at least one transmembrane domain and has an amino acid sequence at least about 50%, 55%, 60%, 65%, 67%, 68%, 70%, 75%, 80%, 85%, 90%, 95%, 96%, 97%, 98%, 99%, 99.2%, 99.3%, 99.4%, 99.5%, 99.6%, 99.7%, 99.8%, 99.9% or more identical to the amino acid sequence of SEQ ID NO:35, or the amino acid sequence encoded by the DNA insert of the plasmid deposited with ATCC as Accession Number ______. In another preferred embodiment, an IC47615 protein includes at least one transmembrane domain and has an IC47615 activity (as described herein).

[1546] In yet another preferred embodiment, an IC47615 protein includes at least one transmembrane domain and is encoded by a nucleic acid molecule having a nucleotide sequence which hybridizes under stringent hybridization conditions to a complement of a nucleic acid molecule comprising the nucleotide sequence of SEQ ID NO:34 or 36.

[1547] In another embodiment, the invention features fragments of the protein having the amino acid sequence of SEQ ID NO:35, wherein the fragment comprises at least 15 amino acids (e.g., contiguous amino acids) of the amino acid sequence of SEQ ID NO:35, or an amino acid sequence encoded by the DNA insert of the plasmid deposited with the ATCC as Accession Number ______. In another embodiment, an IC47615 protein has the amino acid sequence of SEQ ID NO:35.

[1548] In another embodiment, the invention features an IC47615 protein which is encoded by a nucleic acid molecule consisting of a nucleotide sequence at least about 50%, 55%, 60%, 65%, 70%, 75%, 80%, 85%, 90%, 95%, 96%, 97%, 98%, 99%, 99.1%, 99.2%, 99.3%, 99.4%, 99.5%, 99.6%, 99.7%, 99.8%, 99.9% or more identical to a nucleotide sequence of SEQ ID NO:34 or 36, or a complement thereof. This invention further features an IC47615 protein, which is encoded by a nucleic acid molecule consisting of a nucleotide sequence which hybridizes under stringent hybridization conditions to a complement of a nucleic acid molecule comprising the nucleotide sequence,of SEQ ID NO:34 or 36, or a complement thereof.

[1549] The proteins of the present invention or portions thereof, e.g., biologically active portions thereof, can be operatively linked to a non-IC47615 polypeptide (e.g., heterologous amino acid sequences) to form fusion proteins. The invention further features antibodies, such as monoclonal or polyclonal antibodies, that specifically bind proteins of the invention, preferably IC47615 proteins. In addition, the IC47615 proteins or biologically active portions thereof can be incorporated into pharmaceutical compositions, which optionally include pharmaceutically acceptable carriers.

[1550] In another aspect, the present invention provides a method for detecting the presence of an IC47615 nucleic acid molecule, protein, or polypeptide in a biological sample by contacting the biological sample with an agent capable of detecting an IC47615 nucleic acid molecule, protein, or polypeptide such that the presence of an IC47615 nucleic acid molecule, protein or polypeptide is detected in the biological sample.

[1551] In another aspect, the present invention provides a method for detecting the presence of IC47615 activity in a biological sample by contacting the biological sample with an agent capable of detecting an indicator of IC47615 activity such that the presence of IC47615 activity is detected in the biological sample.

[1552] In another aspect, the invention provides a method for modulating IC47615 activity comprising contacting a cell capable of expressing IC47615 with an agent that modulates IC47615 activity such that IC47615 activity in the cell is modulated. In one embodiment, the agent inhibits IC47615 activity. In another embodiment, the agent stimulates IC47615 activity. In one embodiment, the agent is an antibody that specifically binds to an IC47615 protein. In another embodiment, the agent modulates expression of IC47615 by modulating transcription of an IC47615 gene or translation of an IC47615 mRNA. In yet another embodiment, the agent is a nucleic acid molecule having a nucleotide sequence that is antisense to the coding strand of an IC47615 mRNA or an IC47615 gene.

[1553] In one embodiment, the methods of the present invention are used to treat a subject having a disorder characterized by aberrant or unwanted IC47615 protein or nucleic acid expression or activity by administering an agent which is an IC47615 modulator to the subject. In one embodiment, the IC47615 modulator is an IC47615 protein. In another embodiment the IC47615 modulator is an IC47615 nucleic acid molecule. In yet another embodiment, the IC47615 modulator is a peptide, peptidomimetic, or other small molecule. In a preferred embodiment, the disorder characterized by aberrant or unwanted IC47615 protein or nucleic acid expression is a CNS disorder, such as a cognitive or neurodegenerative disorder. In another preferred embodiment, the disorder characterized by aberrant or unwanted IC47615 protein or nucleic acid expression is a cardiovascular disorder. In another preferred embodiment, the disorder characterized by aberrant or unwanted IC47615 protein or nucleic acid expression is a muscular disorder. In another embodiment, the disorder characterized by aberrant or unwanted IC47615 activity is a pain disorder. In another embodiment, the disorder characterized by aberrant or unwanted IC47615 activity is a cell proliferation, growth, differentiation, or migration disorder.

[1554] The present invention also provides diagnostic assays for identifying the presence or absence of a genetic alteration characterized by at least one of (i) aberrant modification or mutation of a gene encoding an IC47615 protein; (ii) mis-regulation of the gene; and (iii) aberrant post-translational modification of an IC47615 protein, wherein a wild-type form of the gene encodes a protein with an IC47615 activity.

[1555] In another aspect the invention provides methods for identifying a compound that binds to or modulates the activity of an IC47615 protein, by providing an indicator composition comprising an IC47615 protein having IC47615 activity, contacting the indicator composition with a test compound, and determining the effect of the test compound on IC47615 activity in the indicator composition to identify a compound that modulates the activity of an IC47615 protein.

[1556] Other features and advantages of the invention will be apparent from the following detailed description and claims.

### Detailed Description of the Invention

[1557] The present invention is based, at least in part, on the discovery of novel molecules, referred to herein as IC47615 (for ion channel 47615) nucleic acid and protein molecules, which are novel members of the ion channel family. These novel molecules are capable of, for example, modulating ion transport in an electrically excitable cell (e.g., a neuronal or muscle (e.g., cardiac muscle) cell), or in a non-electrically excitable cell, e.g., a spleen cell.

[1558] As used herein, the term “ion channel” includes a protein or polypeptide which is involved in receiving, conducting, and transmitting signals in an cell (e.g., an electrically excitable cell, for example, a neuronal or muscle cell). Ion channels can determine membrane excitability (the ability of, for example, a cell to respond to a stimulus and to convert it into a sensory impulse). Ion channels can also influence the resting potential of membranes, wave forms and frequencies of action potentials, and thresholds of excitation. Ion channels are typically expressed in electrically excitable cells, e.g., neuronal cells, and may form heteromultimeric structures (e.g., composed of more than one type of subunit). Ion channels may also be found in non-excitable cells (e.g., endothelial cells or spleen cells), where they may play a role in, for example, signal transduction. As the IC47615 molecules of the present invention may modulate ion channel mediated activities, they may be useful for developing novel diagnostic and therapeutic agents for ion channel associated disorders.

[1559] As used herein, an “ion channel associated disorder” includes a disorder, disease or condition which is characterized by a misregulation of an ion channel mediated activity. Ion channel associated disorders can detrimentally affect conveyance of sensory impulses from the periphery to the brain and/or conductance of motor impulses from the brain to the periphery; integration of reflexes; interpretation of sensory impulses; cellular proliferation, growth, differentiation, or migration, and emotional, intellectual (e.g., learning and memory), or motor processes. Examples of ion channel associated disorders include CNS disorders such as cognitive and neurodegenerative disorders, examples of which include, but are not limited to, Alzheimer's disease, dementias related to Alzheimer's disease (such as Pick's disease), Parkinson's and other Lewy diffuse body diseases, senile dementia, Huntington's disease, Gilles de la Tourette's syndrome, multiple sclerosis, amyotrophic lateral sclerosis, progressive supranuclear palsy, epilepsy, and Jakob-Creutzfieldt disease; autonomic function disorders such as hypertension and sleep disorders, and neuropsychiatric disorders, such as depression, schizophrenia, schizoaffective disorder, korsakoff's psychosis, mania, anxiety disorders, or phobic disorders; learning or memory disorders, e.g., amnesia or age-related memory loss, attention deficit disorder, dysthymic disorder, major depressive disorder, mania, obsessive-compulsive disorder, psychoactive substance use disorders, anxiety, phobias, panic disorder, as well as bipolar affective disorder, e.g., severe bipolar affective (mood) disorder (BP-1), and bipolar affective neurological disorders, e.g., migraine and obesity. Further CNS-related disorders include, for example, those listed in the American Psychiatric Association's Diagnostic and Statistical manual of Mental Disorders (DSM), the most current version of which is incorporated herein by reference in its entirety.

[1560] Ion channel disorders also include pain disorders. The IC47615 molecules of the present invention may be present on sensory neurons and, thus, may be involved in detecting, for example, noxious chemical, mechanical, or thermal stimuli and transducing this information into membrane depolarization events. Thus, the IC47615 molecules by participating in pain signaling mechanisms, may modulate pain elicitation and act as targets for developing novel diagnostic targets and therapeutic agents to control pain.

[1561] Further examples of ion channel associated disorders include cardiovascular system disorders. Cardiovascular system disorders in which the IC47615 molecules of the invention may be directly or indirectly involved include arteriosclerosis, ischemia reperfusion injury, restenosis, arterial inflammation, vascular wall remodeling, ventricular remodeling, rapid ventricular pacing, coronary microembolism, tachycardia, bradycardia, pressure overload, aortic bending, coronary artery ligation, vascular heart disease, atrial fibrilation, Jervell syndrome, Lange-Nielsen syndrome, long-QT syndrome, congestive heart failure, sinus node dysfunction, angina, heart failure, hypertension, atrial fibrillation, atrial flutter, dilated cardiomyopathy, idiopathic cardiomyopathy, myocardial infarction, coronary artery disease, coronary artery spasm, and arrhythmia. IC47615-mediated or related disorders also include disorders of the musculoskeletal system such as paralysis and muscle weakness, e.g., ataxia, myotonia, and myokymia.

[1562] Ion channel disorders also include cellular proliferation, growth, differentiation, or migration disorders. Cellular proliferation, growth, differentiation, or migration disorders include those disorders that affect cell proliferation, growth, differentiation, or migration processes. As used herein, a “cellular proliferation, growth, differentiation, or migration process” is a process by which a cell increases in number, size or content, by which a cell develops a specialized set of characteristics which differ from that of other cells, or by which a cell moves closer to or further from a particular location or stimulus. The IC47615 molecules of the present invention are involved in signal transduction mechanisms, which are known to be involved in cellular growth, differentiation, and migration processes. Thus, the IC47615 molecules may modulate cellular growth, differentiation, or migration, and may play a role in disorders characterized by aberrantly regulated growth, differentiation, or migration. Such disorders include cancer, e.g., carcinoma, sarcoma, or leukemia; tumor angiogenesis and metastasis; skeletal dysplasia; neuronal deficiencies resulting from impaired neural induction and patterning; neurodegenerative disorders, e.g., Alzheimer's disease, dementias related to Alzheimer's disease (such as Pick's disease), Parkinson's and other Lewy diffuse body diseases, multiple sclerosis, amyotrophic lateral sclerosis, progressive supranuclear palsy, epilepsy, Jakob-Creutzfieldt disease, or AIDS related dementia; hepatic disorders; cardiovascular disorders; and hematopoietic and/or myeloproliferative disorders.

[1563] IC47615-associated or related disorders also include disorders of tissues in which IC47615 protein is expressed.

[1564] As used herein, an “ion channel mediated activity” includes an activity which involves an ion channel, e.g., an ion channel associated with receiving, conducting, and transmitting signals, in electrically excitable or non-electrically excitable cells. Ion channel mediated activities include release of neurotransmitters or second messenger molecules, e.g., dopamine or norepinephrine, from cells, e.g., neuronal cells; modulation of resting potential of membranes, wave forms and frequencies of action potentials, and thresholds of excitation; participation in signal transduction pathways; and modulation of processes such as integration of sub-threshold synaptic responses and the conductance of back-propagating action potentials in, for example, neuronal cells (e.g., changes in those action potentials resulting in a morphological or differentiative response in the cell).

[1565] The term “family” when referring to the protein and nucleic acid molecules of the invention is intended to mean two or more proteins or nucleic acid molecules having a common structural domain or motif and having sufficient amino acid or nucleotide sequence homology as defined herein. Such family members can be naturally or non-naturally occurring and can be from either the same or different species. For example, a family can contain a first protein of human origin, as well as other, distinct proteins of human origin or alternatively, can contain homologues of non-human origin, e.g., monkey proteins. Members of a family may also have common functional characteristics.

[1566] For example, the family of IC47615 proteins comprises at least one “transmembrane domain”. As used herein, the term “transmembrane domain” includes an amino acid sequence of about 15 amino acid residues in length which spans the plasma membrane. More preferably, a transmembrane domain includes about at least 20, 25, 30, 35, 40, or 45 amino acid residues and spans the plasma membrane. Transmembrane domains are rich in hydrophobic residues, and typically have an alpha-helical structure. In a preferred embodiment, at least 50%, 60%, 70%, 80%, 90%, 95% or more of the amino acids of a transmembrane domain are hydrophobic, e.g., leucines, isoleucines, tyrosines, or tryptophans. Transmembrane domains are described in, for example, Zagotta W. N. et al. (1996) Annu. Rev. Neurosci. 19:235-263, the contents of which are incorporated herein by reference. Amino acid residues 274-290 of the native IC47615 protein are predicted to comprise a transmembrane domain (see FIGS. 30 and 31). Accordingly, IC47615 proteins having at least 50-60% homology, preferably about 60-70%, more preferably about 70-80%, or about 80-90% homology with a transmembrane domain of human IC47615 are within the scope of the invention.

[1567] Isolated proteins of the present invention, preferably IC47615 proteins, have an amino acid sequence sufficiently identical to the amino acid sequence of SEQ ID NO:35 or are encoded by a nucleotide sequence sufficiently identical to SEQ ID NO:34 or 36. As used herein, the term “sufficiently identical” refers to a first amino acid or nucleotide sequence which contains a sufficient or minimum number of identical or equivalent (e.g., an amino acid residue which has a similar side chain) amino acid residues or nucleotides to a second amino acid or nucleotide sequence such that the first and second amino acid or nucleotide sequences share common structural domains or motifs and/or a common functional activity. For example, amino acid or nucleotide sequences which share common structural domains have at least 30%, 40%, or 50% homology, preferably 60% homology, more preferably 70%-80%, and even more preferably 90-95% homology across the amino acid sequences of the domains and contain at least one and preferably two structural domains or motifs, are defined herein as sufficiently identical. Furthermore, amino acid or nucleotide sequences which share at least 30%, 40%, or 50%, preferably 60%, more preferably 70-80%, or 90-95% homology and share a common functional activity are defined herein as sufficiently identical.

[1568] As used interchangeably herein, an “IC47615 activity”, “biological activity of IC47615” or “functional activity of IC47615”, refers to an activity exerted by an IC47615 protein, polypeptide or nucleic acid molecule on an IC47615 responsive cell or tissue, or on an IC47615 protein substrate, as determined in vivo, or in vitro, according to standard techniques. In one embodiment, an IC47615 activity is a direct activity, such as an association with an IC47615-target molecule. As used herein, a “target molecule” or “binding partner” is a molecule with which an IC47615 protein binds or interacts in nature, such that IC47615-mediated function is achieved. An IC47615 target molecule can be a non-IC47615 molecule or an IC47615 protein or polypeptide of the present invention. In an exemplary embodiment, an IC47615 target molecule is an IC47615 ligand, e.g., an ion channel pore-forming subunit or an ion channel ligand. Alternatively, an IC47615 activity is an indirect activity, such as a cellular signaling activity mediated by interaction of the IC47615 protein with an IC47615 ligand. The biological activities of IC47615 are described herein. For example, the IC47615 proteins of the present invention can have one or more of the following activities: (1) modulation of membrane excitability, (2) modulation of intracellular ion concentration, (3) modulation of membrane polarization (e.g., membrane polarization and/or depolarization), (4) modulation of action potential, (5) modulation of cellular signal transduction, (6) modulation of neurotransmitter release (e.g., from neuronal cells), (7) modulation of synaptic transmission, (8) modulation of neuronal excitability and/or plasticity, (9) modulation of muscle contraction, (10) modulation of cell activation (e.g., T cell activation), and/or (11) modulation of cellular proliferation, growth, migration and/or differentiation.

[1569] Accordingly, another embodiment of the invention features isolated IC47615 proteins and polypeptides having an IC47615 activity. Preferred proteins are IC47615 proteins having one or more transmembrane domains, and, preferably, an IC47615 activity.

[1570] Additional preferred proteins have one or more transmembrane domains, and are, preferably, encoded by a nucleic acid molecule having a nucleotide sequence which hybridizes under stringent hybridization conditions to a complement of a nucleic acid molecule comprising the nucleotide sequence of SEQ ID NO:34 or 36.

[1571] The nucleotide sequence of the isolated human IC47615 cDNA and the predicted amino acid sequence of the human IC47615 polypeptide are shown in FIGS. 29A-C and in SEQ ID NOs:34 and 35, respectively. A plasmid containing the nucleotide sequence encoding human IC47615 was deposited with the American Type Culture Collection (ATCC), 10801 University Boulevard, Manassas, Va. 20110-2209, on ______ and assigned Accession Number ______. This deposit will be maintained under the terms of the Budapest Treaty on the International Recognition of the Deposit of Microorganisms for the Purposes of Patent Procedure. This deposit was made merely as a convenience for those of skill in the art and is not an admission that a deposit is required under 35 U.S.C. §112.

[1572] The human IC47615 gene, which is approximately 4003 nucleotides in length, encodes a protein having a molecular weight of approximately 34.7 kD and which is approximately 305 amino acid residues in length.

[1573] Various aspects of the invention are described in further detail in the following subsections:

[1574] I. Isolated Nucleic Acid Molecules

[1575] One aspect of the invention pertains to isolated nucleic acid molecules that encode IC47615 proteins or biologically active portions thereof, as well as nucleic acid fragments sufficient for use as hybridization probes to identify IC47615-encoding nucleic acid molecules (e.g., IC47615 mRNA) and fragments for use as PCR primers for the amplification or mutation of IC47615 nucleic acid molecules. As used herein, the term “nucleic acid molecule” is intended to include DNA molecules (e.g., cDNA or genomic DNA) and RNA molecules (e.g., mRNA) and analogs of the DNA or RNA generated using nucleotide analogs. The nucleic acid molecule can be single-stranded or double-stranded, but preferably is double-stranded DNA.

[1576] The term “isolated nucleic acid molecule” includes nucleic acid molecules which are separated from other nucleic acid molecules which are present in the natural source of the nucleic acid. For example, with regards to genomic DNA, the term “isolated” includes nucleic acid molecules which are separated from the chromosome with which the genomic DNA is naturally associated. Preferably, an “isolated” nucleic acid is free of sequences which naturally flank the nucleic acid (i.e., sequences located at the 5′ and 3′ ends of the nucleic acid) in the genomic DNA of the organism from which the nucleic acid is derived. For example, in various embodiments, the isolated IC47615 nucleic acid molecule can contain less than about 5 kb, 4 kb, 3 kb, 2 kb, 1 kb, 0.5 kb or 0.1 kb of nucleotide sequences which naturally flank the nucleic acid molecule in genomic DNA of the cell from which the nucleic acid is derived. Moreover, an “isolated” nucleic acid molecule, such as a cDNA molecule, can be substantially free of other cellular material, or culture medium when produced by recombinant techniques, or substantially free of chemical precursors or other chemicals when chemically synthesized.

[1577] A nucleic acid molecule of the present invention, e.g., a nucleic acid molecule having the nucleotide sequence of SEQ ID NO:34 or 36, or the nucleotide sequence of the DNA insert of the plasmid deposited with ATCC as Accession Number ______, or a portion thereof, can be isolated using standard molecular biology techniques and the sequence information provided herein. Using all or portion of the nucleic acid sequence of SEQ ID NO:34 or 36, or the nucleotide sequence of the DNA insert of the plasmid deposited with ATCC as Accession Number ______, as a hybridization probe, IC47615 nucleic acid molecules can be isolated using standard hybridization and cloning techniques (e.g., as described in Sambrook, J. et al., Molecular Cloning: A Laboratory Manual. 2nd, ed., Cold Spring Harbor Laboratory, Cold Spring Harbor Laboratory Press, Cold Spring Harbor, N.Y., 1989).

[1578] Moreover, a nucleic acid molecule encompassing all or a portion of SEQ ID NO:34 or 36, or the nucleotide sequence of the DNA insert of the plasmid deposited with ATCC as Accession Number ______ can be isolated by the polymerase chain reaction (PCR) using synthetic oligonucleotide primers designed based upon the sequence of SEQ ID NO:34 or 36, or the nucleotide sequence of the DNA insert of the plasmid deposited with ATCC as Accession Number ______.

[1579] A nucleic acid of the invention can be amplified using cDNA, mRNA or alternatively, genomic DNA, as a template and appropriate oligonucleotide primers according to standard PCR amplification techniques. The nucleic acid so amplified can be cloned into an appropriate vector and characterized by DNA sequence analysis. Furthermore, oligonucleotides corresponding to IC47615 nucleotide sequences can be prepared by standard synthetic techniques, e.g., using an automated DNA synthesizer.

[1580] In a preferred embodiment, an isolated nucleic acid molecule of the invention comprises the nucleotide sequence shown in SEQ ID NO:34. This cDNA comprises sequences encoding the human IC47615 protein (i.e., “the coding region”, from nucleotides 604-1518), as well as 5′ untranslated sequences (nucleotides 1-603) and 3′ untranslated sequences (nucleotides 1519-4003). Alternatively, the nucleic acid molecule can comprise only the coding region of SEQ ID NO:34 (e.g., nucleotides 604-1518, corresponding to SEQ ID NO:36). In another embodiment, the nucleic acid molecule can comprise the coding region of SEQ ID NO:34 (e.g., nucleotides 604-1518, corresponding to SEQ ID NO:36), as well as a stop codon (e.g., nucleotides 1519-1522 of SEQ ID NO:34).

[1581] In another preferred embodiment, an isolated nucleic acid molecule of the invention comprises a nucleic acid molecule which is a complement of the nucleotide sequence shown in SEQ ID NO:34 or 36, or the nucleotide sequence of the DNA insert of the plasmid deposited with ATCC as Accession Number ______, or a portion of any of these nucleotide sequences. A nucleic acid molecule which is complementary to the nucleotide sequence shown in SEQ ID NO:34 or 36, or the nucleotide sequence of the DNA insert of the plasmid deposited with ATCC as Accession Number ______, is one which is sufficiently complementary to the nucleotide sequence shown in SEQ ID NO:34 or 36, or the nucleotide sequence of the DNA insert of the plasmid deposited with ATCC as Accession Number _______, such that it can hybridize to the nucleotide sequence shown in SEQ ID NO:34 or 36, or the nucleotide sequence of the DNA insert of the plasmid deposited with ATCC as Accession Number ______, thereby forming a stable duplex.

[1582] In still another preferred embodiment, an isolated nucleic acid molecule of the present invention comprises a nucleotide sequence which is at least about 50%, 55%, 60%, 65%, 70%, 75%, 80%, 85%, 90%, 95%, 96%, 97%, 98%, 99%, 99.1%, 99.2%, 99.3%, 99.4%, 99.5%, 99.6%, 99.7%, 99.8%, 99.9% or more identical to the entire length of the nucleotide sequence shown in SEQ ID NO:34 or 36, or the entire length of the nucleotide sequence of the DNA insert of the plasmid deposited with ATCC as Accession Number ______, or a portion of any of these nucleotide sequences.

[1583] Moreover, the nucleic acid molecule of the invention can comprise only a portion of the nucleic acid sequence of SEQ ID NO:34 or 36, or the nucleotide sequence of the DNA insert of the plasmid deposited with ATCC as Accession Number ______, for example, a fragment which can be used as a probe or primer or a fragment encoding a portion of an IC47615 protein, e.g., a biologically active portion of an IC47615 protein. The nucleotide sequence determined from the cloning of the IC47615 gene allows for the generation of probes and primers designed for use in identifying and/or cloning other IC47615 family members, as well as IC47615 homologues from other species. The probe/primer typically comprises substantially purified oligonucleotide. The oligonucleotide typically comprises a region of nucleotide sequence that hybridizes under stringent conditions to at least about 12 or 15, preferably about 20 or 25, more preferably about 30, 35, 40, 45, 50, 55, 60, 65, or 75 consecutive nucleotides of a sense sequence of SEQ ID NO:34 or 36, or the nucleotide sequence of the DNA insert of the plasmid deposited with ATCC as Accession Number ______, of an anti-sense sequence of SEQ ID NO:34 or 36, or the nucleotide sequence of the DNA insert of the plasmid deposited with ATCC as Accession Number ______, or of a naturally occurring allelic variant or mutant of SEQ ID NO:34 or 36, or the nucleotide sequence of the DNA insert of the plasmid deposited with ATCC as Accession Number ______. In one embodiment, a nucleic acid molecule of the present invention comprises a nucleotide sequence which is greater than 50-100, 100-200, 200-300, 300-400, 400-500, 500-600, 600-700, 700-800, 800-900, 900-1000, 1000-1100, 1100-1200, 1200-1300, 1300-1400, 1400-1500, 1500-1600, 1600-1700, 1700-1800, 1800-1900, 1900-2000, 2000-2100, 2100-2200, 2200-2300, 2300-2400, 2400-2500, 3000, 3500, 4000 or more nucleotides in length and hybridizes under stringent hybridization conditions to a nucleic acid molecule of SEQ ID NO:34 or 36, or the nucleotide sequence of the DNA insert of the plasmid deposited with ATCC as Accession Number ______.

[1584] Probes based on the IC47615 nucleotide sequences can be used to detect transcripts or genomic sequences encoding the same or homologous proteins. In preferred embodiments, the probe further comprises a label group attached thereto, e.g., the label group can be a radioisotope, a fluorescent compound, an enzyme, or an enzyme co-factor. Such probes can be used as a part of a diagnostic test kit for identifying cells or tissue which misexpress an IC47615 protein, such as by measuring a level of an IC47615-encoding nucleic acid in a sample of cells from a subject e.g., detecting IC47615 mRNA levels or determining whether a genomic IC47615 gene has been mutated or deleted.

[1585] A nucleic acid fragment encoding a “biologically active portion of an IC47615 protein” can be prepared by isolating a portion of the nucleotide sequence of SEQ ID NO:34 or 36, or the nucleotide sequence of the DNA insert of the plasmid deposited with ATCC as Accession Number ______, which encodes a polypeptide having an IC47615 biological activity (the biological activities of the IC47615 proteins are described herein), expressing the encoded portion of the IC47615 protein (e.g., by recombinant expression in vitro) and assessing the activity of the encoded portion of the IC47615 protein.

[1586] The invention further encompasses nucleic acid molecules that differ from the nucleotide sequence shown in SEQ ID NO:34 or 36, or the nucleotide sequence of the DNA insert of the plasmid deposited with ATCC as Accession Number ______, due to degeneracy of the genetic code and thus encode the same IC47615 proteins as those encoded by the nucleotide sequence shown in SEQ ID NO:34 or 36, or the nucleotide sequence of the DNA insert of the plasmid deposited with ATCC as Accession Number ______. In another embodiment, an isolated nucleic acid molecule of the invention has a nucleotide sequence encoding a protein having an amino acid sequence shown in SEQ ID NO:35.

[1587] In addition to the IC47615 nucleotide sequences shown in SEQ ID NO:34 or 36, or the nucleotide sequence of the DNA insert of the plasmid deposited with ATCC as Accession Number ______, it will be appreciated by those skilled in the art that DNA sequence polymorphisms that lead to changes in the amino acid sequences of the IC47615 proteins may exist within a population (e.g., the human population). Such genetic polymorphism in the IC47615 genes may exist among individuals within a population due to natural allelic variation. As used herein, the terms “gene” and “recombinant gene” refer to nucleic acid molecules which include an open reading frame encoding an IC47615 protein, preferably a mammalian IC47615 protein, and can further include non-coding regulatory sequences, and introns.

[1588] Allelic variants of human IC47615 include both functional and non-functional IC47615 proteins. Functional allelic variants are naturally occurring amino acid sequence variants of the human IC47615 protein that maintain the ability to bind an IC47615 ligand or substrate and/or modulate cell proliferation and/or migration mechanisms. Functional allelic variants will typically contain only conservative substitution of one or more amino acids of SEQ ID NO:35, or substitution, deletion or insertion of non-critical residues in non-critical regions of the protein.

[1589] Non-functional allelic variants are naturally occurring amino acid sequence variants of the human IC47615 protein that do not have the ability to either bind an IC47615 ligand and/or modulate any of the IC47615 activities described herein. Non-functional allelic variants will typically contain a non-conservative substitution, a deletion, or insertion or premature truncation of the amino acid sequence of SEQ ID NO:35, or a substitution, insertion or deletion in critical residues or critical regions.

[1590] The present invention further provides non-human orthologues of the human IC47615 protein. Orthologues of the human IC47615 protein are proteins that are isolated from non-human organisms and possess the same IC47615 ligand binding and/or modulation of membrane excitability activities of the human IC47615 protein. Orthologues of the human IC47615 protein can readily be identified as comprising an amino acid sequence that is substantially identical to SEQ ID NO:35.

[1591] Moreover, nucleic acid molecules encoding other IC47615 family members and, thus, which have a nucleotide sequence which differs from the IC47615 sequences of SEQ ID NO:34 or 36, or the nucleotide sequence of the DNA insert of the plasmid deposited with ATCC as Accession Number ______ are intended to be within the scope of the invention. For example, another IC47615 cDNA can be identified based on the nucleotide sequence of human IC47615. Moreover, nucleic acid molecules encoding IC47615 proteins from different species, and which, thus, have a nucleotide sequence which differs from the IC47615 sequences of SEQ ID NO:34 or 36, or the nucleotide sequence of the DNA insert of the plasmid deposited with ATCC as Accession Number ______ are intended to be within the scope of the invention. For example, a mouse IC47615 cDNA can be identified based on the nucleotide sequence of a human IC47615.

[1592] Nucleic acid molecules corresponding to natural allelic variants and homologues of the IC47615 cDNAs of the invention can be isolated based on their homology to the IC47615 nucleic acids disclosed herein using the cDNAs disclosed herein, or a portion thereof, as a hybridization probe according to standard hybridization techniques under stringent hybridization conditions. Nucleic acid molecules corresponding to natural allelic variants and homologues of the IC47615 cDNAs of the invention can further be isolated by mapping to the same chromosome or locus as the IC47615 gene.

[1593] Accordingly, in another embodiment, an isolated nucleic acid molecule of the invention is at least 15, 20, 25, 30 or more nucleotides in length and hybridizes under stringent conditions to the nucleic acid molecule comprising the nucleotide sequence of SEQ ID NO:34 or 36, or the nucleotide sequence of the DNA insert of the plasmid deposited with ATCC as Accession Number ______. In other embodiment, the nucleic acid is at least 50-100, 100-200, 200-300, 300-400, 400-500, 500-600, 600-700, 700-800, 800-900, 900-1000, 1000-1100, 1100-1200, 1200-1300, 1300-1400, 1400-1500, 1500-1600, 1600-1700, 1700-1800, 1800-1900, 1900-2000, 2000-2100, 2100-2200, 2200-2300, 2300-2400, 2400-2500, 3000, 3500, 4000 or more nucleotides in length.

[1594] As used herein, the term “hybridizes under stringent conditions” is intended to describe conditions for hybridization and washing under which nucleotide sequences that are significantly identical or homologous to each other remain hybridized to each other. Preferably, the conditions are such that sequences at least about 70%, more preferably at least about 80%, even more preferably at least about 85% or 90% identical to each other remain hybridized to each other. Such stringent conditions are known to those skilled in the art and can be found in Current Protocols in Molecular Biology, Ausubel et al., eds., John Wiley & Sons, Inc. (1995), sections 2, 4, and 6. Additional stringent conditions can be found in Molecular Cloning: A Laboratory Manual, Sambrook et al., Cold Spring Harbor Press, Cold Spring Harbor, N.Y. (1989), chapters 7, 9, and 11. A preferred, non-limiting example of stringent hybridization conditions includes hybridization in 4×sodium chloride/sodium citrate (SSC), at about 65-70° C. (or alternatively hybridization in 4×SSC plus 50% formamide at about 42-50° C.) followed by one or more washes in 1×SSC, at about 65-70° C. A preferred, non-limiting example of highly stringent hybridization conditions includes hybridization in 1×SSC, at about 65-70° C. (or alternatively hybridization in 1×SSC plus 50% formamide at about 42-50° C.) followed by one or more washes in 0.3×SSC, at about 65-70° C. A preferred, non-limiting example of reduced stringency hybridization conditions includes hybridization in 4×SSC, at about 50-60° C. (or alternatively hybridization in 6×SSC plus 50% formamide at about 40-45° C.) followed by one or more washes in 2×SSC, at about 50-60° C. Ranges intermediate to the above-recited values, e.g., at 65-70° C. or at 42-50° C. are also intended to be encompassed by the present invention. SSPE (1×SSPE is 0.15M NaCl, 10 mM NaH₂PO₄, and 1.25 mM EDTA, pH 7.4) can be substituted for SSC (1×SSC is 0.15M NaCl and 15 mM sodium citrate) in the hybridization and wash buffers; washes are performed for 15 minutes each after hybridization is complete. The hybridization temperature for hybrids anticipated to be less than 50 base pairs in length should be 5-10° C. less than the melting temperature (Tₘ) of the hybrid, where Tₘ is determined according to the following equations. For hybrids less than 18 base pairs in length, Tₘ(° C.)=2(# of A+T bases)+4(# of G+C bases). For hybrids between 18 and 49 base pairs in length, T_{m(° C.)=}81.5+16.6(log₁₀[Na⁺])+0.41(%G+C)−(600/N), where N is the number of bases in the hybrid, and [Na⁺] is the concentration of sodium ions in the hybridization buffer ([Na⁺] for 1×SSC=0.165 M). It will also be recognized by the skilled practitioner that additional reagents may be added to hybridization and/or wash buffers to decrease non-specific hybridization of nucleic acid molecules to membranes, for example, nitrocellulose or nylon membranes, including but not limited to blocking agents (e.g., BSA or salmon or herring sperm carrier DNA), detergents (e.g., SDS), chelating agents (e.g., EDTA), Ficoll, PVP and the like. When using nylon membranes, in particular, an additional preferred, non-limiting example of stringent hybridization conditions is hybridization in 0.25-0.5M NaH₂PO₄, 7% SDS at about 65° C., followed by one or more washes at 0.02M NaH₂PO₄, 1% SDS at 65° C. (see e.g., Church and Gilbert (1984) Proc. Natl. Acad. Sci. USA 81:1991-1995), or alternatively 0.2×SSC, 1% SDS.

[1595] Preferably, an isolated nucleic acid molecule of the invention that hybridizes under stringent conditions to the sequence of SEQ ID NO:34 or 36, and corresponds to a naturally-occurring nucleic acid molecule. As used herein, a “naturally-occurring” nucleic acid molecule refers to an RNA or DNA molecule having a nucleotide sequence that occurs in nature (e.g., encodes a natural protein).

[1596] In addition to naturally-occurring allelic variants of the IC47615 sequences that may exist in the population, the skilled artisan will further appreciate that changes can be introduced by mutation into the nucleotide sequences of SEQ ID NO:34 or 36, or the nucleotide sequence of the DNA insert of the plasmid deposited with ATCC as Accession Number ______, thereby leading to changes in the amino acid sequence of the encoded IC47615 proteins, without altering the functional ability of the IC47615 proteins. For example, nucleotide substitutions leading to amino acid substitutions at “non-essential” amino acid residues can be made in the sequence of SEQ ID NO:34 or 36, or the nucleotide sequence of the DNA insert of the plasmid deposited with ATCC as Accession Number ______. A “non-essential” amino acid residue is a residue that can be altered from the wild-type sequence of IC47615 (e.g., the sequence of SEQ ID NO:35) without altering the biological activity, whereas an “essential” amino acid residue is required for biological activity. For example, amino acid residues that are conserved among the IC47615 proteins of the present invention, e.g., those present in a transmembrane domain, are predicted to be particularly unamenable to alteration. Furthermore, additional amino acid residues that are conserved between the IC47615 proteins of the present invention and other members of the IC47615 family are not likely to be amenable to alteration.

[1597] Accordingly, another aspect of the invention pertains to nucleic acid molecules encoding IC47615 proteins that contain changes in amino acid residues that are not essential for activity. Such IC47615 proteins differ in amino acid sequence from SEQ ID NO:35, yet retain biological activity. In one embodiment, the isolated nucleic acid molecule comprises a nucleotide sequence encoding a protein, wherein the protein comprises an amino acid sequence at least about 50%, 55%, 60%, 65%, 70%, 75%, 80%, 85%, 90%, 95%, 96%, 97%, 98%, 99%, 99.1%, 99.2%, 99.3%, 99.4%, 99.5%, 99.6%, 99.7%, 99.8%, 99.9% or more identical to SEQ ID NO:35.

[1598] An isolated nucleic acid molecule encoding an IC47615 protein identical to the protein of SEQ ID NO:35, can be created by introducing one or more nucleotide substitutions, additions or deletions into the nucleotide sequence of SEQ ID NO:34 or 36, or the nucleotide sequence of the DNA insert of the plasmid deposited with ATCC as Accession Number ______, such that one or more amino acid substitutions, additions or deletions are introduced into the encoded protein. Mutations can be introduced into SEQ ID NO:34 or 36, or the nucleotide sequence of the DNA insert of the plasmid deposited with ATCC as Accession Number ______ by standard techniques, such as site-directed mutagenesis and PCR-mediated mutagenesis. Preferably, conservative amino acid substitutions are made at one or more predicted non-essential amino acid residues. A “conservative amino acid substitution” is one in which the amino acid residue is replaced with an amino acid residue having a similar side chain. Families of amino acid residues having similar side chains have been defined in the art. These families include amino acids with basic side chains (e.g., lysine, arginine, histidine), acidic side chains (e.g., aspartic acid, glutamic acid), uncharged polar side chains (e.g., glycine, asparagine, glutamine, serine, threonine, tyrosine, cysteine), nonpolar side chains (e.g., alanine, valine, leucine, isoleucine, proline, phenylalanine, methionine, tryptophan), beta-branched side chains (e.g., threonine, valine, isoleucine) and aromatic side chains (e.g., tyrosine, phenylalanine, tryptophan, histidine). Thus, a predicted nonessential amino acid residue in an IC47615 protein is preferably replaced with another amino acid residue from the same side chain family. Alternatively, in another embodiment, mutations can be introduced randomly along all or part of an IC47615 coding sequence, such as by saturation mutagenesis, and the resultant mutants can be screened for IC47615 biological activity to identify mutants that retain activity. Following mutagenesis of SEQ ID NO:34 or 36, or the nucleotide sequence of the DNA insert of the plasmid deposited with ATCC as Accession Number ______,the encoded protein can be expressed recombinantly and the activity of the protein can be determined.

[1599] In a preferred embodiment, a mutant IC47615 protein can be assayed for the ability to (1) modulate membrane excitability, (2) regulate intracellular ion concentration, (3) modulate membrane polarization (e.g., membrane polarization and/or depolarization), (4) regulate action potential, (5) regulate cellular signal transduction, (6) regulate neurotransmitter release (e.g., from neuronal cells), (7) modulate synaptic transmission, (8) regulate neuronal excitability and/or plasticity, (9) regulate muscle contraction, (10) regulate cell activation and (11) regulate cellular proliferation, growth, migration and/or differentiation.

[1600] In addition to the nucleic acid molecules encoding IC47615 proteins described above, another aspect of the invention pertains to isolated nucleic acid molecules which are antisense thereto. An “antisense” nucleic acid comprises a nucleotide sequence which is complementary to a “sense” nucleic acid encoding a protein, e.g., complementary to the coding strand of a double-stranded cDNA molecule or complementary to an mRNA sequence. Accordingly, an antisense nucleic acid can hydrogen bond to a sense nucleic acid. The antisense nucleic acid can be complementary to an entire IC47615 coding strand, or to only a portion thereof. In one embodiment, an antisense nucleic acid molecule is antisense to a “coding region” of the coding strand of a nucleotide sequence encoding IC47615. The term “coding region” refers to the region of the nucleotide sequence comprising codons which are translated into amino acid residues (e.g., the coding region of human IC47615 corresponds to SEQ ID NO:36). In another embodiment, the antisense nucleic acid molecule is antisense to a “noncoding region” of the coding strand of a nucleotide sequence encoding IC47615. The term “noncoding region” refers to 5′ and 3′ sequences which flank the coding region that are not translated into amino acids (i.e., also referred to as 5′ and 3′ untranslated regions).

[1601] Given the coding strand sequences encoding IC47615 disclosed herein (e.g., SEQ ID NO:36), antisense nucleic acids of the invention can be designed according to the rules of Watson and Crick base pairing. The antisense nucleic acid molecule can be complementary to the entire coding region of IC47615 mRNA, but more preferably is an oligonucleotide which is antisense to only a portion of the coding or noncoding region of IC47615 mRNA. For example, the antisense oligonucleotide can be complementary to the region surrounding the translation start site of IC47615 mRNA. An antisense oligonucleotide can be, for example, about 5, 10, 15, 20, 25, 30, 35, 40, 45 or 50 nucleotides in length. An antisense nucleic acid of the invention can be constructed using chemical synthesis and enzymatic ligation reactions using procedures known in the art. For example, an antisense nucleic acid (e.g., an antisense oligonucleotide) can be chemically synthesized using naturally occurring nucleotides or variously modified nucleotides designed to increase the biological stability of the molecules or to increase the physical stability of the duplex formed between the antisense and sense nucleic acids, e.g., phosphorothioate derivatives and acridine substituted nucleotides can be used. Examples of modified nucleotides which can be used to generate the antisense nucleic acid include 5-fluorouracil, 5-bromouracil, 5-chlorouracil, 5-iodouracil, hypoxanthine, xantine, 4-acetylcytosine, 5-(carboxyhydroxylmethyl) uracil, 5-carboxymethylaminomethyl-2-thiouridine, 5-carboxymethylaminomethyluracil, dihydrouracil, beta-D-galactosylqueosine, inosine, N6-isopentenyladenine, 1-methylguanine, 1-methylinosine, 2,2-dimethylguanine, 2-methyladenine, 2-methylguanine, 3-methylcytosine, 5-methylcytosine, N6-adenine, 7-methylguanine, 5-methylaminomethyluracil, 5-methoxyaminomethyl-2-thiouracil, beta-D-mannosylqueosine, 5′-methoxycarboxymethyluracil, 5-methoxyuracil, 2-methylthio-N6-isopentenyladenine, uracil-5-oxyacetic acid (v), wybutoxosine, pseudouracil, queosine, 2-thiocytosine, 5-methyl-2-thiouracil, 2-thiouracil, 4-thiouracil, 5-methyluracil, uracil-5- oxyacetic acid methylester, uracil-5-oxyacetic acid (v), 5-methyl-2-thiouracil, 3-(3-amino-3-N-2-carboxypropyl) uracil, (acp3)w, and 2,6-diaminopurine. Alternatively, the antisense nucleic acid can be produced biologically using an expression vector into which a nucleic acid has been subcloned in an antisense orientation (i.e., RNA transcribed from the inserted nucleic acid will be of an antisense orientation to a target nucleic acid of interest, described further in the following subsection).

[1602] The antisense nucleic acid molecules of the invention are typically administered to a subject or generated in situ such that they hybridize with or bind to cellular mRNA and/or genomic DNA encoding an IC47615 protein to thereby inhibit expression of the protein, e.g., by inhibiting transcription and/or translation. The hybridization can be by conventional nucleotide complementarity to form a stable duplex, or, for example, in the case of an antisense nucleic acid molecule which binds to DNA duplexes, through specific interactions in the major groove of the double helix. An example of a route of administration of antisense nucleic acid molecules of the invention includes direct injection at a tissue site. Alternatively, antisense nucleic acid molecules can be modified to target selected cells and then administered systemically. For example, for systemic administration, antisense molecules can be modified such that they specifically bind to receptors or antigens expressed on a selected cell surface, e.g., by linking the antisense nucleic acid molecules to peptides or antibodies which bind to cell surface receptors or antigens. The antisense nucleic acid molecules can also be delivered to cells using the vectors described herein. To achieve sufficient intracellular concentrations of the antisense molecules, vector constructs in which the antisense nucleic acid molecule is placed under the control of a strong pol II or pol III promoter are preferred.

[1603] In yet another embodiment, the antisense nucleic acid molecule of the invention is an α-anomeric nucleic acid molecule. An α-anomeric nucleic acid molecule forms specific double-stranded hybrids with complementary RNA in which, contrary to the usual β-units, the strands run parallel to each other (Gaultier et al. (1987) Nucleic Acids. Res. 15:6625-6641). The antisense nucleic acid molecule can also comprise a 2′-o-methylribonucleotide (Inoue et al. (1987) Nucleic Acids Res. 15:6131-6148) or a chimeric RNA-DNA analogue (Inoue et al. (1987) FEBS Lett. 215:327-330).

[1604] In still another embodiment, an antisense nucleic acid of the invention is a ribozyme. Ribozymes are catalytic RNA molecules with ribonuclease activity which are capable of cleaving a single-stranded nucleic acid, such as an mRNA, to which they have a complementary region. Thus, ribozymes (e.g., hammerhead ribozymes (described in Haseloff and Gerlach (1988) Nature 334:585-591)) can be used to catalytically cleave IC47615 mRNA transcripts to thereby inhibit translation of IC47615 mRNA. A ribozyme having specificity for an IC47615-encoding nucleic acid can be designed based upon the nucleotide sequence of an IC47615 cDNA disclosed herein (i.e., SEQ ID NO:34 or 36, or the nucleotide sequence of the DNA insert of the plasmid deposited with ATCC as Accession Number ______). For example, a derivative of a Tetrahymena L-19 IVS RNA can be constructed in which the nucleotide sequence of the active site is complementary to the nucleotide sequence to be cleaved in an IC47615-encoding mRNA. See, e.g., Cech et al. U.S. Pat. No. 4,987,071; and Cech et al. U.S. Pat. No. 5,116,742. Alternatively, IC47615 mRNA can be used to select a catalytic RNA having a specific ribonuclease activity from a pool of RNA molecules. See, e.g., Bartel, D. and Szostak, J. W. (1993) Science 261:1411-1418.

[1605] Alternatively, IC47615 gene expression can be inhibited by targeting nucleotide sequences complementary to the regulatory region of the IC47615 (e.g., the IC47615 promoter and/or enhancers; e.g., nucleotides 1-603 of SEQ ID NO:34) to form triple helical structures that prevent transcription of the IC47615 gene in target cells. See generally, Helene, C. (1991) Anticancer Drug Des. 6(6):569-84; Helene, C. et al. (1992) Ann. N.Y. Acad. Sci. 660:27-36; and Maher, L. J. (1992) Bioessays 14(12):807-15.

[1606] In yet another embodiment, the IC47615 nucleic acid molecules of the present invention can be modified at the base moiety, sugar moiety or phosphate backbone to improve, e.g., the stability, hybridization, or solubility of the molecule. For example, the deoxyribose phosphate backbone of the nucleic acid molecules can be modified to generate peptide nucleic acids (see Hyrup, B. and Nielsen, P. E. (1996) Bioorg. Med. Chem. 4(1):5-23). As used herein, the terms “peptide nucleic acids” or “PNAs” refer to nucleic acid mimics, e.g., DNA mimics, in which the deoxyribose phosphate backbone is replaced by a pseudopeptide backbone and only the four natural nucleobases are retained. The neutral backbone of PNAs has been shown to allow for specific hybridization to DNA and RNA under conditions of low ionic strength. The synthesis of PNA oligomers can be performed using standard solid phase peptide synthesis protocols as described in Hyrup and Nielsen (1996) supra and Perry-O'Keefe et al. (1996) Proc. Natl. Acad. Sci USA 93:14670-675.

[1607] PNAs of IC47615 nucleic acid molecules can be used in therapeutic and diagnostic applications. For example, PNAs can be used as antisense or antigene agents for sequence-specific modulation of gene expression by, for example, inducing transcription or translation arrest or inhibiting replication. PNAs of IC47615 nucleic acid molecules can also be used in the analysis of single base pair mutations in a gene, (e.g., by PNA-directed PCR clamping); as ‘artificial restriction enzymes’ when used in combination with other enzymes (e.g, S1 nucleases (Hyrup and Nielsen (1996) supra)); or as probes or primers for DNA sequencing or hybridization (Hyrup and Nielsen (1996) supra; Perry-O'Keefe et al. (1996) supra).

[1608] In another embodiment, PNAs of IC47615 can be modified, (e.g., to enhance their stability or cellular uptake), by attaching lipophilic or other helper groups to PNA, by the formation of PNA-DNA chimeras, or by the use of liposomes or other techniques of drug delivery known in the art. For example, PNA-DNA chimeras of IC47615 nucleic acid molecules can be generated which may combine the advantageous properties of PNA and DNA. Such chimeras allow DNA recognition enzymes, (e.g., RNAse H and DNA polymerases), to interact with the DNA portion while the PNA portion would provide high binding affinity and specificity. PNA-DNA chimeras can be linked using linkers of appropriate lengths selected in terms of base stacking, number of bonds between the nucleobases, and orientation (Hyrup and Nielsen (1996) supra). The synthesis of PNA-DNA chimeras can be performed as described in Hyrup and Nielsen (1996) supra and Finn, P. J. et al. (1996) Nucleic Acids Res. 24(17):3357-63. For example, a DNA chain can be synthesized on a solid support using standard phosphoramidite coupling chemistry and modified nucleoside analogs, e.g., 5′-(4-methoxytrityl)amino-5′-deoxy-thymidine phosphoramidite, can be used as a between the PNA and the 5′ end of DNA (Mag, M. et al. (1989) Nucleic Acids Res. 17:5973-88). PNA monomers are then coupled in a stepwise manner to produce a chimeric molecule with a 5′ PNA segment and a 3′ DNA segment (Finn P. J. et al. (1996) supra). Alternatively, chimeric molecules can be synthesized with a 5′ DNA segment and a 3′ PNA segment (Peterser, K. H. et al. (1975) Bioorganic Med. Chem. Lett. 5:1119-11124).

[1609] In other embodiments, the oligonucleotide may include other appended groups such as peptides (e.g., for targeting host cell receptors in vivo), or agents facilitating transport across the cell membrane (see, e.g., Letsinger et al. (1989) Proc. Natl. Acad. Sci. USA 86:6553-6556; Lemaitre et al. (1987) Proc. Natl. Acad. Sci. USA 84:648-652; PCT Publication No. W088/09810) or the blood-brain barrier (see, e.g., PCT Publication No. W089/10134). In addition, oligonucleotides can be modified with hybridization-triggered cleavage agents (See, e.g., Krol et al. (1988) Bio-Techniques 6:958-976) or intercalating agents. (See, e.g., Zon (1988) Pharm. Res. 5:539-549). To this end, the oligonucleotide may be conjugated to another molecule, (e.g., a peptide, hybridization triggered cross-linking agent, transport agent, or hybridization-triggered cleavage agent).

[1610] Alternatively, the expression characteristics of an endogenous IC47615 gene within a cell line or microorganism may be modified by inserting a heterologous DNA regulatory element into the genome of a stable cell line or cloned microorganism such that the inserted regulatory element is operatively linked with the endogenous IC47615 gene. For example, an endogenous IC47615 gene which is normally “transcriptionally silent”, i.e., an IC47615 gene which is normally not expressed, or is expressed only at very low levels in a cell line or microorganism, may be activated by inserting a regulatory element which is capable of promoting the expression of a normally expressed gene product in that cell line or microorganism. Alternatively, a transcriptionally silent, endogenous IC47615 gene may be activated by insertion of a promiscuous regulatory element that works across cell types.

[1611] A heterologous regulatory element may be inserted into a stable cell line or cloned microorganism, such that it is operatively linked with an endogenous IC47615 gene, using techniques, such as targeted homologous recombination, which are well known to those of skill in the art, and described, e.g., in Chappel, U.S. Pat. No. 5,272,071; PCT publication No. WO 91/06667, published May 16, 1991.

[1612] II. Isolated IC47615 Proteins and Anti-IC47615 Antibodies

[1613] One aspect of the invention pertains to isolated IC47615 proteins, and biologically active portions thereof, as well as polypeptide fragments suitable for use as immunogens to raise anti-IC47615 antibodies. In one embodiment, native IC47615 proteins can be isolated from cells or tissue sources by an appropriate purification scheme using standard protein purification techniques. In another embodiment, IC47615 proteins are produced by recombinant DNA techniques. Alternative to recombinant expression, an IC47615 protein or polypeptide can be synthesized chemically using standard peptide synthesis techniques.

[1614] An “isolated” or “purified” protein or biologically active portion thereof is substantially free of cellular material or other contaminating proteins from the cell or tissue source from which the IC47615 protein is derived, or substantially free from chemical precursors or other chemicals when chemically synthesized. The language “substantially free of cellular material” includes preparations of IC47615 protein in which the protein is separated from cellular components of the cells from which it is isolated or recombinantly produced. In one embodiment, the language “substantially free of cellular material” includes preparations of IC47615 protein having less than about 30% (by dry weight) of non-IC47615 protein (also referred to herein as a “contaminating protein”), more preferably less than about 20% of non-IC47615 protein, still more preferably less than about 10% of non-IC47615 protein, and most preferably less than about 5% non-IC47615 protein. When the IC47615 protein or biologically active portion thereof is recombinantly produced, it is also preferably substantially free of culture medium, i.e., culture medium represents less than about 20%, more preferably less than about 10%, and most preferably less than about 5% of the volume of the protein preparation.

[1615] The language “substantially free of chemical precursors or other chemicals” includes preparations of IC47615 protein in which the protein is separated from chemical precursors or other chemicals which are involved in the synthesis of the protein. In one embodiment, the language “substantially free of chemical precursors or other chemicals” includes preparations of IC47615 protein having less than about 30% (by dry weight) of chemical precursors or non-IC47615 chemicals, more preferably less than about 20% chemical precursors or non-IC47615 chemicals, still more preferably less than about 10% chemical precursors or non-IC47615 chemicals, and most preferably less than about 5% chemical precursors or non-IC47615 chemicals.

[1616] As used herein, a “biologically active portion” of an IC47615 protein includes a fragment of an IC47615 protein which participates in an interaction between an IC47615 molecule and a non-IC47615 molecule. Biologically active portions of an IC47615 protein include peptides comprising amino acid sequences sufficiently identical to or derived from the amino acid sequence of the IC47615 protein, e.g., the amino acid sequence shown in SEQ ID NO:35, which include less amino acids than the full length IC47615 proteins, and exhibit at least one activity of an IC47615 protein. Typically, biologically active portions comprise a domain or motif with at least one activity of the IC47615 protein, e.g., modulating membrane excitability. A biologically active portion of an IC47615 protein can be a polypeptide which is, for example, 25, 50, 75, 100, 125, 150, 175, 200 or more amino acids in length. Biologically active portions of an IC47615 protein can be used as targets for developing agents which modulate an IC47615 mediated activity, e.g., modulation of membrane excitability.

[1617] In one embodiment, a biologically active portion of an IC47615 protein comprises at least one transmembrane domain. Moreover, other biologically active portions, in which other regions of the protein are deleted, can be prepared by recombinant techniques and evaluated for one or more of the functional activities of a native IC47615 protein.

[1618] In a preferred embodiment, the IC47615 protein has an amino acid sequence shown in SEQ ID NO:35. In other embodiments, the IC47615 protein is substantially identical to SEQ ID NO:35, and retains the functional activity of the protein of SEQ ID NO:35, yet differs in amino acid sequence due to natural allelic variation or mutagenesis, as described in detail in subsection I above. Accordingly, in another embodiment, the IC47615 protein is a protein which comprises an amino acid sequence at least about 50%, 55%, 60%, 65%, 70%, 75%, 80%, 85%, 90%, 95%, 96%, 97%, 98%, 99%, 99.1%, 99.2%, 99.3%, 99.4%, 99.5%, 99.6%, 99.7%, 99.8%, 99.9% or more identical to SEQ ID NO:35.

[1619] To determine the percent identity of two amino acid sequences or of two nucleic acid sequences, the sequences are aligned for optimal comparison purposes (e.g., gaps can be introduced in one or both of a first and a second amino acid or nucleic acid sequence for optimal alignment and non-identical sequences can be disregarded for comparison purposes). In a preferred embodiment, the length of a reference sequence aligned for comparison purposes is at least 30%, preferably at least 40%, more preferably at least 50%, even more preferably at least 60%, and even more preferably at least 70%, 80%, or 90% of the length of the reference sequence (e.g., when aligning a second sequence to the IC47615 amino acid sequence of SEQ ID NO:35 having 305 amino acid residues, at least 92, preferably at least 122, more preferably at least 153, even more preferably at least 183, and even more preferably at least 214, 244, 275 or more amino acid residues are aligned). The amino acid residues or nucleotides at corresponding amino acid positions or nucleotide positions are then compared. When a position in the first sequence is occupied by the same amino acid residue or nucleotide as the corresponding position in the second sequence, then the molecules are identical at that position (as used herein amino acid or nucleic acid “identity” is equivalent to amino acid or nucleic acid “homology”). The percent identity between the two sequences is a function of the number of identical positions shared by the sequences, taking into account the number of gaps, and the length of each gap, which need to be introduced for optimal alignment of the two sequences.

[1620] The comparison of sequences and determination of percent identity between two sequences can be accomplished using a mathematical algorithm. In a preferred embodiment, the percent identity between two amino acid sequences is determined using the Needleman and Wunsch (J. Mol. Biol. (48):444-453 (1970)) algorithm which has been incorporated into the GAP program in the GCG software package (available at http://www.gcg.com), using either a Blosum 62 matrix or a PAM250 matrix, and a gap weight of 16, 14, 12, 10, 8, 6, or 4 and a length weight of 1, 2, 3, 4, 5, or 6. In yet another preferred embodiment, the percent identity between two nucleotide sequences is determined using the GAP program in the GCG software package (available at http://www.gcg.com), using a NWSgapdna.CMP matrix and a gap weight of 40, 50, 60, 70, or 80 and a length weight of 1, 2, 3, 4, 5, or 6. In another embodiment, the percent identity between two amino acid or nucleotide sequences is determined using the algorithm of E. Meyers and W. Miller (Comput. Appl. Biosci. 4:11-17 (1988)) which has been incorporated into the ALIGN program (version 2.0), using a PAM120 weight residue table, a gap length penalty of 12 and a gap penalty of 4.

[1621] The nucleic acid and protein sequences of the present invention can further be used as a “query sequence” to perform a search against public databases to, for example, identify other family members or related sequences. Such searches can be performed using the NBLAST and XBLAST programs (version 2.0) of Altschul et al. (1990) J. Mol. Biol. 215:403-10. BLAST nucleotide searches can be performed with the NBLAST program, score=100, wordlength=12 to obtain nucleotide sequences homologous to IC47615 nucleic acid molecules of the invention. BLAST protein searches can be performed with the XBLAST program, score=100, wordlength=3 to obtain amino acid sequences homologous to IC47615 protein molecules of the invention. To obtain gapped alignments for comparison purposes, Gapped BLAST can be utilized as described in Altschul et al. (1997) Nucleic Acids Res. 25(17):3389-3402. When utilizing BLAST and Gapped BLAST programs, the default parameters of the respective programs (e.g., XBLAST and NBLAST) can be used. See http://www.ncbi.nlm.nih.gov.

[1622] The invention also provides IC47615 chimeric or fusion proteins. As used herein, an IC47615 “chimeric protein” or “fusion protein” comprises an IC47615 polypeptide operatively linked to a non-IC47615 polypeptide. An “IC47615 polypeptide” refers to a polypeptide having an amino acid sequence corresponding to IC47615, whereas a “non-IC47615 polypeptide” refers to a polypeptide having an amino acid sequence corresponding to a protein which is not substantially homologous to the IC47615 protein, e.g., a protein which is different from the IC47615 protein and which is derived from the same or a different organism. Within an IC47615 fusion protein the IC47615 polypeptide can correspond to all or a portion of an IC47615 protein. In a preferred embodiment, an IC47615 fusion protein comprises at least one biologically active portion of an IC47615 protein. In another preferred embodiment, an IC47615 fusion protein comprises at least two biologically active portions of an IC47615 protein. Within the fusion protein, the term “operatively linked” is intended to indicate that the IC47615 polypeptide and the non-IC47615 polypeptide are fused in-frame to each other. The non-IC47615 polypeptide can be fused to the N-terminus or C-terminus of the IC47615 polypeptide.

[1623] For example, in one embodiment, the fusion protein is a GST-IC47615 fusion protein in which the IC47615 sequences are fused to the C-terminus of the GST sequences. Such fusion proteins can facilitate the purification of recombinant IC47615.

[1624] In another embodiment, the fusion protein is an IC47615 protein containing a heterologous signal sequence at its N-terminus. In certain host cells (e.g., mammalian host cells), expression and/or secretion of IC47615 can be increased through use of a heterologous signal sequence.

[1625] The IC47615 fusion proteins of the invention can be incorporated into pharmaceutical compositions and administered to a subject in vivo. The IC47615 fusion proteins can be used to affect the bioavailability of an IC47615 substrate. Use of IC47615 fusion proteins may be useful therapeutically for the treatment of disorders caused by, for example, (i) aberrant modification or mutation of a gene encoding an IC47615 protein; (ii) mis-regulation of the IC47615 gene; and (iii) aberrant post-translational modification of an IC47615 protein.

[1626] Moreover, the IC47615-fusion proteins of the invention can be used as immunogens to produce anti-IC47615 antibodies in a subject, to purify IC47615 ligands and in screening assays to identify molecules which inhibit the interaction of IC47615 with an IC47615 substrate.

[1627] Preferably, an IC47615 chimeric or fusion protein of the invention is produced by standard recombinant DNA techniques. For example, DNA fragments coding for the different polypeptide sequences are ligated together in-frame in accordance with conventional techniques, for example by employing blunt-ended or stagger-ended termini for ligation, restriction enzyme digestion to provide for appropriate termini, filling-in of cohesive ends as appropriate, alkaline phosphatase treatment to avoid undesirable joining, and enzymatic ligation. In another embodiment, the fusion gene can be synthesized by conventional techniques including automated DNA synthesizers. Alternatively, PCR amplification of gene fragments can be carried out using anchor primers which give rise to complementary overhangs between two consecutive gene fragments which can subsequently be annealed and reamplified to generate a chimeric gene sequence (see, for example, Current Protocols in Molecular Biology, eds. Ausubel et al. John Wiley & Sons: 1992). Moreover, many expression vectors are commercially available that already encode a fusion moiety (e.g., a GST polypeptide). An IC47615-encoding nucleic acid can be cloned into such an expression vector such that the fusion moiety is linked in-frame to the IC47615 protein.

[1628] The present invention also pertains to variants of the IC47615 proteins which function as either IC47615 agonists (mimetics) or as IC47615 antagonists. Variants of the IC47615 proteins can be generated by mutagenesis, e.g., discrete point mutation or truncation of an IC47615 protein. An agonist of the IC47615 proteins can retain substantially the same, or a subset, of the biological activities of the naturally occurring form of an IC47615 protein. An antagonist of an IC47615 protein can inhibit one or more of the activities of the naturally occurring form of the IC47615 protein by, for example, competitively modulating an IC47615-mediated activity of an IC47615 protein. Thus, specific biological effects can be elicited by treatment with a variant of limited function. In one embodiment, treatment of a subject with a variant having a subset of the biological activities of the naturally occurring form of the protein has fewer side effects in a subject relative to treatment with the naturally occurring form of the IC47615 protein.

[1629] In one embodiment, variants of an IC47615 protein which function as either IC47615 agonists (mimetics) or as IC47615 antagonists can be identified by screening combinatorial libraries of mutants, e.g., truncation mutants, of an IC47615 protein for IC47615 protein agonist or antagonist activity. In one embodiment, a variegated library of IC47615 variants is generated by combinatorial mutagenesis at the nucleic acid level and is encoded by a variegated gene library. A variegated library of IC47615 variants can be produced by, for example, enzymatically ligating a mixture of synthetic oligonucleotides into gene sequences such that a degenerate set of potential IC47615 sequences is expressible as individual polypeptides, or alternatively, as a set of larger fusion proteins (e.g., for phage display) containing the set of IC47615 sequences therein. There are a variety of methods that can be used to produce libraries of potential IC47615 variants from a degenerate oligonucleotide sequence. Chemical synthesis of a degenerate gene sequence can be performed in an automatic DNA synthesizer, and the synthetic gene then ligated into an appropriate expression vector. Use of a degenerate set of genes allows for the provision, in one mixture, of all of the sequences encoding the desired set of potential IC47615 sequences. Methods for synthesizing degenerate oligonucleotides are known in the art (see, e.g., Narang, S. A. (1983) Tetrahedron 39:3; Itakura et al. (1984) Annu. Rev. Biochem. 53:323; Itakura et al. (1984) Science 198:1056; Ike et al. (1983) Nucleic Acids Res. 11:477.

[1630] In addition, libraries of fragments of an IC47615 protein coding sequence can be used to generate a variegated population of IC47615 fragments for screening and subsequent selection of variants of an IC47615 protein. In one embodiment, a library of coding sequence fragments can be generated by treating a double stranded PCR fragment of an IC47615 coding sequence with a nuclease under conditions wherein nicking occurs only about once per molecule, denaturing the double stranded DNA, renaturing the DNA to form double stranded DNA which can include sense/antisense pairs from different nicked products, removing single stranded portions from reformed duplexes by treatment with S1 nuclease, and ligating the resulting fragment library into an expression vector. By this method, an expression library can be derived which encodes N-terminal, C-terminal and internal fragments of various sizes of the IC47615 protein.

[1631] Several techniques are known in the art for screening gene products of combinatorial libraries made by point mutations or truncation, and for screening cDNA libraries for gene products having a selected property. Such techniques are adaptable for rapid screening of the gene libraries generated by the combinatorial mutagenesis of IC47615 proteins. The most widely used techniques, which are amenable to high through-put analysis, for screening large gene libraries typically include cloning the gene library into replicable expression vectors, transforming appropriate cells with the resulting library of vectors, and expressing the combinatorial genes under conditions in which detection of a desired activity facilitates isolation of the vector encoding the gene whose product was detected. Recursive ensemble mutagenesis (REM), a new technique which enhances the frequency of functional mutants in the libraries, can be used in combination with the screening assays to identify IC47615 variants (Arkin and Youvan (1992) Proc. Natl. Acad. Sci. USA 89:7811-7815; Delagrave et al. (1993) Protein Eng. 6(3):327-331).

[1632] In one embodiment, cell based assays can be exploited to analyze a variegated IC47615 library. For example, a library of expression vectors can be transfected into a cell line, e.g., a neuronal cell line, which ordinarily responds to an IC47615 ligand in a particular IC47615 ligand-dependent manner. The transfected cells are then contacted with an IC47615 ligand and the effect of expression of the mutant on, e.g., membrane excitability of IC47615 can be detected. Plasmid DNA can then be recovered from the cells which score for inhibition, or alternatively, potentiation of signaling by the IC47615 ligand, and the individual clones further characterized.

[1633] An isolated IC47615 protein, or a portion or fragment thereof, can be used as an immunogen to generate antibodies that bind IC47615 using standard techniques for polyclonal and monoclonal antibody preparation. A full-length IC47615 protein can be used or, alternatively, the invention provides antigenic peptide fragments of IC47615 for use as immunogens. The antigenic peptide of IC47615 comprises at least 8 amino acid residues of the amino acid sequence shown in SEQ ID NO:35 and encompasses an epitope of IC47615 such that an antibody raised against the peptide forms a specific immune complex with IC47615. Preferably, the antigenic peptide comprises at least 10 amino acid residues, more preferably at least 15 amino acid residues, even more preferably at least 20 amino acid residues, and most preferably at least 30 amino acid residues.

[1634] Preferred epitopes encompassed by the antigenic peptide are regions of IC47615 that are located on the surface of the protein, e.g., hydrophilic regions, as well as regions with high antigenicity (see FIG. 30).

[1635] An IC47615 immunogen typically is used to prepare antibodies by immunizing a suitable subject, (e.g., rabbit, goat, mouse or other mammal) with the immunogen. An appropriate immunogenic preparation can contain, for example, recombinantly expressed IC47615 protein or a chemically synthesized IC47615 polypeptide. The preparation can further include an adjuvant, such as Freund's complete or incomplete adjuvant, or similar immunostimulatory agent. Immunization of a suitable subject with an immunogenic IC47615 preparation induces a polyclonal anti-IC47615 antibody response.

[1636] Accordingly, another aspect of the invention pertains to anti-IC47615 antibodies. The term “antibody” as used herein refers to immunoglobulin molecules and immunologically active portions of immunoglobulin molecules, i.e., molecules that contain an antigen binding site which specifically binds (immunoreacts with) an antigen, such as IC47615. Examples of immunologically active portions of immunoglobulin molecules include F(ab) and F(ab′)₂ fragments which can be generated by treating the antibody with an enzyme such as pepsin. The invention provides polyclonal and monoclonal antibodies that bind IC47615. The term “monoclonal antibody” or “monoclonal antibody composition”, as used herein, refers to a population of antibody molecules that contain only one species of an antigen binding site capable of immunoreacting with a particular epitope of IC47615. A monoclonal antibody composition thus typically displays a single binding affinity for a particular IC47615 protein with which it immunoreacts.

[1637] Polyclonal anti-IC47615 antibodies can be prepared as described above by immunizing a suitable subject with an IC47615 immunogen. The anti-IC47615 antibody titer in the immunized subject can be monitored over time by standard techniques, such as with an enzyme linked immunosorbent assay (ELISA) using immobilized IC47615. If desired, the antibody molecules directed against IC47615 can be isolated from the mammal (e.g., from the blood) and further purified by well known techniques, such as protein A chromatography to obtain the IgG fraction. At an appropriate time after immunization, e.g., when the anti-IC47615 antibody titers are highest, antibody-producing cells can be obtained from the subject and used to prepare monoclonal antibodies by standard techniques, such as the hybridoma technique originally described by Kohler and Milstein (1975) Nature 256:495-497) (see also, Brown et al. (1981) J. Immunol. 127:539-46; Brown et al. (1980) J. Biol. Chem. 255:4980-83; Yeh et al. (1976) Proc. Natl. Acad. Sci. USA 76:2927-31; and Yeh et al. (1982) Int. J. Cancer 29:269-75), the more recent human B cell hybridoma technique (Kozbor et al. (1983) Immunol. Today 4:72), the EBV-hybridoma technique (Cole et al. (1985), Monoclonal Antibodies and Cancer Therapy, Alan R. Liss, Inc., pp. 77-96) or trioma techniques. The technology for producing monoclonal antibody hybridomas is well known (see generally Kenneth, R. H., in Monoclonal Antibodies: A New Dimension In Biological Analyses, Plenum Publishing Corp., New York, N.Y. (1980); Lerner, E. A. (1981) Yale J. Biol. Med. 54:387-402; Gefter, M. L. et al. (1977) Somatic Cell Genet. 3:231-36). Briefly, an immortal cell line (typically a myeloma) is fused to lymphocytes (typically splenocytes) from a mammal immunized with an IC47615 immunogen as described above, and the culture supernatants of the resulting hybridoma cells are screened to identify a hybridoma producing a monoclonal antibody that binds IC47615.

[1638] Any of the many well known protocols used for fusing lymphocytes and immortalized cell lines can be applied for the purpose of generating an anti-IC47615 monoclonal antibody (see, e.g., Galfre, G. et al. (1977) Nature 266:55052; Gefter et al. (1977) supra; Lerner (1981) supra; Kenneth, Monoclonal Antibodies, cited supra). Moreover, the ordinarily skilled worker will appreciate that there are many variations of such methods which also would be useful. Typically, the immortal cell line (e.g., a myeloma cell line) is derived from the same mammalian species as the lymphocytes. For example, murine hybridomas can be made by fusing lymphocytes from a mouse immunized with an immunogenic preparation of the present invention with an immortalized mouse cell line. Preferred immortal cell lines are mouse myeloma cell lines that are sensitive to culture medium containing hypoxanthine, aminopterin and thymidine (“HAT medium”). Any of a number of myeloma cell lines can be used as a fusion partner according to standard techniques, e.g., the P3-NS1/1-Ag4-1, P3-x63-Ag8.653 or Sp2/O-Ag14 myeloma lines. These myeloma lines are available from ATCC. Typically, HAT-sensitive mouse myeloma cells are fused to mouse splenocytes using polyethylene glycol (“PEG”). Hybridoma cells resulting from the fusion are then selected using HAT medium, which kills unfused and unproductively fused myeloma cells (unfused splenocytes die after several days because they are not transformed). Hybridoma cells producing a monoclonal antibody of the invention are detected by screening the hybridoma culture supernatants for antibodies that bind IC47615, e.g., using a standard ELISA assay.

[1639] Alternative to preparing monoclonal antibody-secreting hybridomas, a monoclonal anti-IC47615 antibody can be identified and isolated by screening a recombinant combinatorial immunoglobulin library (e.g., an antibody phage display library) with IC47615 to thereby isolate immunoglobulin library members that bind IC47615. Kits for generating and screening phage display libraries are commercially available (e.g., the Pharmacia Recombinant Phage Antibody System, Catalog No. 27-9400-01; and the Stratagene SurfZAP™ Phage Display Kit, Catalog No. 240612). Additionally, examples of methods and reagents particularly amenable for use in generating and screening antibody display library can be found in, for example, Ladner et al. U.S. Pat. No. 5,223,409; Kang et al. PCT International Publication No. WO 92/18619; Dower et al. PCT International Publication No. WO 91/17271; Winter et al. PCT International Publication WO 92/20791; Markland et al. PCT International Publication No. WO 92/15679; Breitling et al. PCT International Publication WO 93/01288; McCafferty et al. PCT International Publication No. WO 92/01047; Garrard et al. PCT International Publication No. WO 92/09690; Ladner et al. PCT International Publication No. WO 90/02809; Fuchs et al. (1991) Biotechnology (NY) 9:1369-1372; Hay et al. (1992) Hum. Antibod. Hybridomas 3:81-85; Huse et al. (1989) Science 246:1275-1281; Griffiths et al. (1993) EMBO J. 12:725-734; Hawkins et al. (1992) J. Mol. Biol. 226:889-896; Clackson et al. (1991) Nature 352:624-628; Gram et al. (1992) Proc. Natl. Acad. Sci. USA 89:3576-3580; Garrard et al. (1991) Biotechnology (NY) 9:1373-1377; Hoogenboom et al. (1991) Nucleic Acids Res. 19:4133-4137; Barbas et al. (1991) Proc. Natl. Acad. Sci. USA 88:7978-7982; and McCafferty et al. (1990) Nature 348:552-554.

[1640] Additionally, recombinant anti-IC47615 antibodies, such as chimeric and humanized monoclonal antibodies, comprising both human and non-human portions, which can be made using standard recombinant DNA techniques, are within the scope of the invention. Such chimeric and humanized monoclonal antibodies can be produced by recombinant DNA techniques known in the art, for example using methods described in Robinson et al. International Application No. PCT/US86/02269; Akira, et al. European Patent Application 184,187; Taniguchi, M., European Patent Application 171,496; Morrison et al. European Patent Application 173,494; Neuberger et al. PCT International Publication No. WO 86/01533; Cabilly et al. U.S. Pat. No. 4,816,567; Cabilly et al. European Patent Application 125,023; Better et al. (1988) Science 240:1041-1043; Liu et al. (1987) Proc. Natl. Acad. Sci. USA 84:3439-3443; Liu et al. (1987) i J. Immunol. 139:3521-3526; Sun et al. (1987) Proc. Natl. Acad. Sci. USA 84:214-218; Nishimura et al. (1987) Cancer Res. 47:999-1005; Wood et al. (1985) Nature 314:446-449; and Shaw et al. (1988) J. Natl. Cancer Inst. 80:1553-1559); Morrison, S. L. (1985) Science 229:1202-1207; Oi et al. (1986) BioTechniques 4:214; Winter U.S. Pat. No. 5,225,539; Jones et al. (1986) Nature 321:552-525; Verhoeyen et al. (1988) Science 239:1534; and Beidler et al. (1988) i J. Immunol. 141:4053-4060.

[1641] An anti-IC47615 antibody (e.g., monoclonal antibody) can be used to isolate IC47615 by standard techniques, such as affinity chromatography or immunoprecipitation. An anti-IC47615 antibody can facilitate the purification of natural IC47615 from cells and of recombinantly produced IC47615 expressed in host cells. Moreover, an anti-IC47615 antibody can be used to detect IC47615 protein (e.g., in a cellular lysate or cell supernatant) in order to evaluate the abundance and pattern of expression of the IC47615 protein. Anti-IC47615 antibodies can be used diagnostically to monitor protein levels in tissue as part of a clinical testing procedure, e.g., to, for example, determine the efficacy of a given treatment regimen. Detection can be facilitated by coupling (i.e., physically linking) the antibody to a detectable substance. Examples of detectable substances include various enzymes, prosthetic groups, fluorescent materials, luminescent materials, bioluminescent materials, and radioactive materials. Examples of suitable enzymes include horseradish peroxidase, alkaline phosphatase, β-galactosidase, or acetylcholinesterase; examples of suitable prosthetic group complexes include streptavidin/biotin and avidin/biotin; examples of suitable fluorescent materials include umbelliferone, fluorescein, fluorescein isothiocyanate, rhodamine, dichlorotriazinylamine fluorescein, dansyl chloride or phycoerythrin; an example of a luminescent material includes luminol; examples of bioluminescent materials include luciferase, luciferin, and aequorin, and examples of suitable radioactive material include ¹²⁵I, ¹³¹I, ³⁵S or ³H.

[1642] III. Recombinant Expression Vectors and Host Cells

[1643] Another aspect of the invention pertains to vectors, preferably expression vectors, containing a nucleic acid encoding an IC47615 protein (or a portion thereof). As used herein, the term “vector” refers to a nucleic acid molecule capable of transporting another nucleic acid to which it has been linked. One type of vector is a “plasmid”, which refers to a circular double stranded DNA loop into which additional DNA segments can be ligated. Another type of vector is a viral vector, wherein additional DNA segments can be ligated into the viral genome. Certain vectors are capable of autonomous replication in a host cell into which they are introduced (e.g., bacterial vectors having a bacterial origin of replication and episomal mammalian vectors). Other vectors (e.g., non-episomal mammalian vectors) are integrated into the genome of a host cell upon introduction into the host cell, and thereby are replicated along with the host genome. Moreover, certain vectors are capable of directing the expression of genes to which they are operatively linked. Such vectors are referred to herein as “expression vectors”. In general, expression vectors of utility in recombinant DNA techniques are often in the form of plasmids. In the present specification, “plasmid” and “vector” can be used interchangeably as the plasmid is the most commonly used form of vector. However, the invention is intended to include such other forms of expression vectors, such as viral vectors (e.g., replication defective retroviruses, adenoviruses and adeno-associated viruses), which serve equivalent functions.

[1644] The recombinant expression vectors of the invention comprise a nucleic acid of the invention in a form suitable for expression of the nucleic acid in a host cell, which means that the recombinant expression vectors include one or more regulatory sequences, selected on the basis of the host cells to be used for expression, which is operatively linked to the nucleic acid sequence to be expressed. Within a recombinant expression vector, “operably linked” is intended to mean that the nucleotide sequence of interest is linked to the regulatory sequence(s) in a manner which allows for expression of the nucleotide sequence (e.g., in an in vitro transcription/translation system or in a host cell when the vector is introduced into the host cell). The term “regulatory sequence” is intended to include promoters, enhancers and other expression control elements (e.g., polyadenylation signals). Such regulatory sequences are described, for example, in Goeddel (1990) Methods Enzymol. 185:3-7. Regulatory sequences include those which direct constitutive expression of a nucleotide sequence in many types of host cells and those which direct expression of the nucleotide sequence only in certain host cells (e.g., tissue-specific regulatory sequences). It will be appreciated by those skilled in the art that the design of the expression vector can depend on such factors as the choice of the host cell to be transformed, the level of expression of protein desired, and the like. The expression vectors of the invention can be introduced into host cells to thereby produce proteins or peptides, including fusion proteins or peptides, encoded by nucleic acids as described herein (e.g., IC47615 proteins, mutant forms of IC47615 proteins, fusion proteins, and the like).

[1645] The recombinant expression vectors of the invention can be designed for expression of IC47615 proteins in prokaryotic or eukaryotic cells. For example, IC47615 proteins can be expressed in bacterial cells such as E. coli, insect cells (using baculovirus expression vectors) yeast cells or mammalian cells. Suitable host cells are discussed further in Goeddel (1990) supra. Alternatively, the recombinant expression vector can be transcribed and translated in vitro, for example using T7 promoter regulatory sequences and T7 polymerase.

[1646] Expression of proteins in prokaryotes is most often carried out in E. coli with vectors containing constitutive or inducible promoters directing the expression of either fusion or non-fusion proteins. Fusion vectors add a number of amino acids to a protein encoded therein, usually to the amino terminus of the recombinant protein. Such fusion vectors typically serve three purposes: 1) to increase expression of recombinant protein; 2) to increase the solubility of the recombinant protein; and 3) to aid in the purification of the recombinant protein by acting as a ligand in affinity purification. Often, in fusion expression vectors, a proteolytic cleavage site is introduced at the junction of the fusion moiety and the recombinant protein to enable separation of the recombinant protein from the fusion moiety subsequent to purification of the fusion protein. Such enzymes, and their cognate recognition sequences, include Factor Xa, thrombin and enterokinase. Typical fusion expression vectors include pGEX (Pharmacia Biotech Inc; Smith, D. B. and Johnson, K. S. (1988) Gene 67:31-40), pMAL (New England Biolabs, Beverly, Mass.) and pRIT5 (Pharmacia, Piscataway, N.J.) which fuse glutathione S-transferase (GST), maltose E binding protein, or protein A, respectively, to the target recombinant protein.

[1647] Purified fusion proteins can be utilized in IC47615 activity assays, (e.g., direct assays or competitive assays described in detail below), or to generate antibodies specific for IC47615 proteins, for example. In a preferred embodiment, an IC47615 fusion protein expressed in a retroviral expression vector of the present invention can be utilized to infect bone marrow cells which are subsequently transplanted into irradiated recipients. The pathology of the subject recipient is then examined after sufficient time has passed (e.g., six (6) weeks).

[1648] Examples of suitable inducible non-fusion E. coli expression vectors include pTrc (Amann et al. (1988) Gene 69:301-315) and pET 11d (Studier et al. (1990) Methods Enzymol. 185:60-89) (Studier et al. (1990) Methods Enzymol. 185:60-89). Target gene expression from the pTrc vector relies on host RNA polymerase transcription from a hybrid trp-lac fusion promoter. Target gene expression from the pET 11d vector relies on transcription from a T7 gn10-lac fusion promoter mediated by a coexpressed viral RNA polymerase (T7 gn1). This viral polymerase is supplied by host strains BL21(DE3) or HMS174(DE3) from a resident prophage harboring a T7 gn1 gene under the transcriptional control of the lacUV 5 promoter.

[1649] One strategy to maximize recombinant protein expression in E. coli is to express the protein in a host bacteria with an impaired capacity to proteolytically cleave the recombinant protein (Gottesman, S. (1990) Methods Enzymol. 185:119-128). Another strategy is to alter the nucleic acid sequence of the nucleic acid to be inserted into an expression vector so that the individual codons for each amino acid are those preferentially utilized in E. coli (Wada et al. (1992) Nucleic Acids Res. 20:2111-2118). Such alteration of nucleic acid sequences of the invention can be carried out by standard DNA synthesis techniques.

[1650] In another embodiment, the IC47615 expression vector is a yeast expression vector. Examples of vectors for expression in yeast S. cerevisiae include pYepSec1 (Baldari, et al. (1987) EMBO J. 6:229-234), pMFa (Kurjan and Herskowitz (1982) Cell 30:933-943), pJRY88 (Schultz et al. (1987) Gene 54:113-123), pYES2 (Invitrogen Corporation, San Diego, Calif.), and picZ (Invitrogen Corp, San Diego, Calif.).

[1651] Alternatively, IC47615 proteins can be expressed in insect cells using baculovirus expression vectors. Baculovirus vectors available for expression of proteins in cultured insect cells (e.g., Sf 9 cells) include the pAc series (Smith et al. (1983) Mol. Cell Biol. 3:2156-2165) and the pVL series (Lucklow and Summers (1989) Virology 170:31-39).

[1652] In yet another embodiment, a nucleic acid of the invention is expressed in mammalian cells using a mammalian expression vector. Examples of mammalian expression vectors include pCDM8 (Seed, B. (1987) Nature 329:840) and pMT2PC (Kaufman et al. (1987) EMBO J. 6:187-195). When used in mammalian cells, the expression vector's control functions are often provided by viral regulatory elements. For example, commonly used promoters are derived from polyoma, Adenovirus 2, cytomegalovirus and Simian Virus 40. For other suitable expression systems for both prokaryotic and eukaryotic cells see chapters 16 and 17 of Sambrook, J. et al., Molecular Cloning: A Laboratory Manual. 2nd, ed., Cold Spring Harbor Laboratory, Cold Spring Harbor Laboratory Press, Cold Spring Harbor, N.Y., 1989.

[1653] In another embodiment, the recombinant mammalian expression vector is capable of directing expression of the nucleic acid preferentially in a particular cell type (e.g., tissue-specific regulatory elements are used to express the nucleic acid). Tissue-specific regulatory elements are known in the art. Non-limiting examples of suitable tissue-specific promoters include the albumin promoter (liver-specific; Pinkert et al. (1987) Genes Dev. 1:268-277), lymphoid-specific promoters (Calame and Eaton (1988) Adv. Immunol. 43:235-275), in particular promoters of T cell receptors (Winoto and Baltimore (1989) EMBO J. 8:729-733) and immunoglobulins (Banerji et al. (1983) Cell 33:729-740; Queen and Baltimore (1983) Cell 33:741-748), neuron-specific promoters (e.g., the neurofilament promoter; Byrne and Ruddle (1989) Proc. Natl. Acad. Sci. USA 86:5473-5477), pancreas-specific promoters (Edlund et al. (1985) Science 230:912-916), and mammary gland-specific promoters (e.g., milk whey promoter; U.S. Pat. No. 4,873,316 and European Application Publication No. 264,166). Developmentally-regulated promoters are also encompassed, for example the murine hox promoters (Kessel and Gruss (1990) Science 249:374-379) and the α-fetoprotein promoter (Campes and Tilghman (1989) Genes Dev. 3:537-546).

[1654] The invention further provides a recombinant expression vector comprising a DNA molecule of the invention cloned into the expression vector in an antisense orientation. That is, the DNA molecule is operatively linked to a regulatory sequence in a manner which allows for expression (by transcription of the DNA molecule) of an RNA molecule which is antisense to IC47615 mRNA. Regulatory sequences operatively linked to a nucleic acid cloned in the antisense orientation can be chosen which direct the continuous expression of the antisense RNA molecule in a variety of cell types, for instance viral promoters and/or enhancers, or regulatory sequences can be chosen which direct constitutive, tissue specific or cell type specific expression of antisense RNA. The antisense expression vector can be in the form of a recombinant plasmid, phagemid or attenuated virus in which antisense nucleic acids are produced under the control of a high efficiency regulatory region, the activity of which can be determined by the cell type into which the vector is introduced. For a discussion of the regulation of gene expression using antisense genes see Weintraub, H. et al., Antisense RNA as a molecular tool for genetic analysis, Reviews—Trends in Genetics, Vol. 1(1) 1986.

[1655] Another aspect of the invention pertains to host cells into which an IC47615 nucleic acid molecule of the invention is introduced, e.g., an IC47615 nucleic acid molecule within a recombinant expression vector or an IC47615 nucleic acid molecule containing sequences which allow it to homologously recombine into a specific site of the host cell's genome. The terms “host cell” and “recombinant host cell” are used interchangeably herein. It is understood that such terms refer not only to the particular subject cell but to the progeny or potential progeny of such a cell. Because certain modifications may occur in succeeding generations due to either mutation or environmental influences, such progeny may not, in fact, be identical to the parent cell, but are still included within the scope of the term as used herein.

[1656] A host cell can be any prokaryotic or eukaryotic cell. For example, an IC47615 protein can be expressed in bacterial cells such as E. coli, insect cells, yeast or mammalian cells (such as Chinese hamster ovary cells (CHO) or COS cells). Other suitable host cells are known to those skilled in the art.

[1657] Vector DNA can be introduced into prokaryotic or eukaryotic cells via conventional transformation or transfection techniques. As used herein, the terms “transformation” and “transfection” are intended to refer to a variety of art-recognized techniques for introducing foreign nucleic acid (e.g., DNA) into a host cell, including calcium phosphate or calcium chloride co-precipitation, DEAE-dextran-mediated transfection, lipofection, or electroporation. Suitable methods for transforming or transfecting host cells can be found in Sambrook, et al. (Molecular Cloning: A Laboratory Manual. 2nd, ed., Cold Spring Harbor Laboratory, Cold Spring Harbor Laboratory Press, Cold Spring Harbor, N.Y., 1989), and other laboratory manuals.

[1658] For stable transfection of mammalian cells, it is known that, depending upon the expression vector and transfection technique used, only a small fraction of cells may integrate the foreign DNA into their genome. In order to identify and select these integrants, a gene that encodes a selectable marker (e.g., resistance to antibiotics) is generally introduced into the host cells along with the gene of interest. Preferred selectable markers include those which confer resistance to drugs, such as G418, hygromycin and methotrexate. Nucleic acid encoding a selectable marker can be introduced into a host cell on the same vector as that encoding an IC47615 protein or can be introduced on a separate vector. Cells stably transfected with the introduced nucleic acid can be identified by drug selection (e.g., cells that have incorporated the selectable marker gene will survive, while the other cells die).

[1659] A host cell of the invention, such as a prokaryotic or eukaryotic host cell in culture, can be used to produce (i.e., express) an IC47615 protein. Accordingly, the invention further provides methods for producing an IC47615 protein using the host cells of the invention. In one embodiment, the method comprises culturing the host cell of the invention (into which a recombinant expression vector encoding an IC47615 protein has been introduced) in a suitable medium such that an IC47615 protein is produced. In another embodiment, the method further comprises isolating an IC47615 protein from the medium or the host cell.

[1660] The host cells of the invention can also be used to produce non-human transgenic animals. For example, in one embodiment, a host cell of the invention is a fertilized oocyte or an embryonic stem cell into which IC47615-coding sequences have been introduced. Such host cells can then be used to create non-human transgenic animals in which exogenous IC47615 sequences have been introduced into their genome or homologous recombinant animals in which endogenous IC47615 sequences have been altered. Such animals are useful for studying the function and/or activity of an IC47615 and for identifying and/or evaluating modulators of IC47615 activity. As used herein, a “transgenic animal” is a non-human animal, preferably a mammal, more preferably a rodent such as a rat or mouse, in which one or more of the cells of the animal includes a transgene. Other examples of transgenic animals include non-human primates, sheep, dogs, cows, goats, chickens, amphibians, and the like. A transgene is exogenous DNA which is integrated into the genome of a cell from which a transgenic animal develops and which remains in the genome of the mature animal, thereby directing the expression of an encoded gene product in one or more cell types or tissues of the transgenic animal. As used herein, a “homologous recombinant animal” is a non-human animal, preferably a mammal, more preferably a mouse, in which an endogenous IC47615 gene has been altered by homologous recombination between the endogenous gene and an exogenous DNA molecule introduced into a cell of the animal, e.g., an embryonic cell of the animal, prior to development of the animal.

[1661] A transgenic animal of the invention can be created by introducing an IC47615-encoding nucleic acid into the male pronuclei of a fertilized oocyte, e.g., by microinjection, retroviral infection, and allowing the oocyte to develop in a pseudopregnant female foster animal. The IC47615 cDNA sequence of SEQ ID NO:34 can be introduced as a transgene into the genome of a non-human animal. Alternatively, a nonhuman homologue of a human IC47615 gene, such as a mouse or rat IC47615 gene, can be used as a transgene. Alternatively, an IC47615 gene homologue, such as another IC47615 family member, can be isolated based on hybridization to the IC47615 cDNA sequences of SEQ ID NO:34 or 36, or the DNA insert of the plasmid deposited with ATCC as Accession Number ______ (described further in subsection I above) and used as a transgene. Intronic sequences and polyadenylation signals can also be included in the transgene to increase the efficiency of expression of the transgene. A tissue-specific regulatory sequence(s) can be operably linked to an IC47615 transgene to direct expression of an IC47615 protein to particular cells. Methods for generating transgenic animals via embryo manipulation and microinjection, particularly animals such as mice, have become conventional in the art and are described, for example, in U.S. Pat. Nos. 4,736,866 and 4,870,009, both by Leder et al., U.S. Pat. No. 4,873,191 by Wagner et al. and in Hogan, B., Manipulating the Mouse Embryo, (Cold Spring Harbor Laboratory Press, Cold Spring Harbor, N.Y., 1986). Similar methods are used for production of other transgenic animals. A transgenic founder animal can be identified based upon the presence of an IC47615 transgene in its genome and/or expression of IC47615 mRNA in tissues or cells of the animals. A transgenic founder animal can then be used to breed additional animals carrying the transgene. Moreover, transgenic animals carrying a transgene encoding an IC47615 protein can further be bred to other transgenic animals carrying other transgenes.

[1662] To create a homologous recombinant animal, a vector is prepared which contains at least a portion of an IC47615 gene into which a deletion, addition or substitution has been introduced to thereby alter, e.g., functionally disrupt, the IC47615 gene. The IC47615 gene can be a human gene (e.g., the cDNA of SEQ ID NO:36), but more preferably, is a non-human homologue of a human IC47615 gene (e.g., a cDNA isolated by stringent hybridization with the nucleotide sequence of SEQ ID NO:34). For example, a mouse IC47615 gene can be used to construct a homologous recombination nucleic acid molecule, e.g., a vector, suitable for altering an endogenous IC47615 gene in the mouse genome. In a preferred embodiment, the homologous recombination nucleic acid molecule is designed such that, upon homologous recombination, the endogenous IC47615 gene is functionally disrupted (i.e., no longer encodes a functional protein; also referred to as a “knock out” vector). Alternatively, the homologous recombination nucleic acid molecule can be designed such that, upon homologous recombination, the endogenous IC47615 gene is mutated or otherwise altered but still encodes functional protein (e.g., the upstream regulatory region can be altered to thereby alter the expression of the endogenous IC47615 protein). In the homologous recombination nucleic acid molecule, the altered portion of the IC47615 gene is flanked at its 5′ and 3′ ends by additional nucleic acid sequence of the IC47615 gene to allow for homologous recombination to occur between the exogenous IC47615 gene carried by the homologous recombination nucleic acid molecule and an endogenous IC47615 gene in a cell, e.g., an embryonic stem cell. The additional flanking IC47615 nucleic acid sequence is of sufficient length for successful homologous recombination with the endogenous gene. Typically, several kilobases of flanking DNA (both at the 5′ and 3′ ends) are included in the homologous recombination nucleic acid molecule (see, e.g., Thomas, K. R. and Capecchi, M. R. (1987) Cell 51:503 for a description of homologous recombination vectors). The homologous recombination nucleic acid molecule is introduced into a cell, e.g., an embryonic stem cell line (e.g., by electroporation) and cells in which the introduced IC47615 gene has homologously recombined with the endogenous IC47615 gene are selected (see e.g., Li, E. et al. (1992) Cell 69:915). The selected cells can then be injected into a blastocyst of an animal (e.g., a mouse) to form aggregation chimeras (see e.g., Bradley, A. in Teratocarcinomas and Embryonic Stem Cells: A Practical Approach, E. J. Robertson, ed. (IRL, Oxford, 1987) pp. 113-152). A chimeric embryo can then be implanted into a suitable pseudopregnant female foster animal and the embryo brought to term. Progeny harboring the homologously recombined DNA in their germ cells can be used to breed animals in which all cells of the animal contain the homologously recombined DNA by germline transmission of the transgene. Methods for constructing homologous recombination nucleic acid molecules, e.g., vectors, or homologous recombinant animals are described further in Bradley, A. (1991) Current Opinion in Biotechnology 2:823-829 and in PCT International Publication Nos.: WO 90/11354 by Le Mouellec et al.; WO 91/01140 by Smithies et al.; WO 92/0968 by Zijlstra et al.; and WO 93/04169 by Berns et al.

[1663] In another embodiment, transgenic non-human animals can be produced which contain selected systems which allow for regulated expression of the transgene. One example of such a system is the cre/loxP recombinase system of bacteriophage P1. For a description of the cre/loxP recombinase system, see, e.g., Lakso et al. (1992) Proc. Natl. Acad. Sci. USA 89:6232-6236. Another example of a recombinase system is the FLP recombinase system of Saccharomyces cerevisiae (O'Gorman et al. (1991) Science 251:1351-1355. If a cre/loxP recombinase system is used to regulate expression of the transgene, animals containing transgenes encoding both the Cre recombinase and a selected protein are required. Such animals can be provided through the construction of “double” transgenic animals, e.g., by mating two transgenic animals, one containing a transgene encoding a selected protein and the other containing a transgene encoding a recombinase.

[1664] Clones of the non-human transgenic animals described herein can also be produced according to the methods described in Wilmut, I. et al. (1997) Nature 385:810-813 and PCT International Publication Nos. WO 97/07668 and WO 97/07669. In brief, a cell, e.g., a somatic cell, from the transgenic animal can be isolated and induced to exit the growth cycle and enter G₀ phase. The quiescent cell can then be fused, e.g., through the use of electrical pulses, to an enucleated oocyte from an animal of the same species from which the quiescent cell is isolated. The reconstructed oocyte is then cultured such that it develops to morula or blastocyte and then transferred to pseudopregnant female foster animal. The offspring borne of this female foster animal will be a clone of the animal from which the cell, e.g., the somatic cell, is isolated.

[1665] IV. Pharmaceutical Compositions

[1666] The IC47615 nucleic acid molecules, fragments of IC47615 proteins, and anti-IC47615 antibodies (also referred to herein as “active compounds”) of the invention can be incorporated into pharmaceutical compositions suitable for administration. Such compositions typically comprise the nucleic acid molecule, protein, or antibody and a pharmaceutically acceptable carrier. As used herein the language “pharmaceutically acceptable carrier” is intended to include any and all solvents, dispersion media, coatings, antibacterial and antifungal agents, isotonic and absorption delaying agents, and the like, compatible with pharmaceutical administration. The use of such media and agents for pharmaceutically active substances is well known in the art. Except insofar as any conventional media or agent is incompatible with the active compound, use thereof in the compositions is contemplated. Supplementary active compounds can also be incorporated into the compositions.

[1667] A pharmaceutical composition of the invention is formulated to be compatible with its intended route of administration. Examples of routes of administration include parenteral, e.g., intravenous, intradermal, subcutaneous, oral (e.g., inhalation), transdermal (topical), transmucosal, and rectal administration. Solutions or suspensions used for parenteral, intradermal, or subcutaneous application can include the following components: a sterile diluent such as water for injection, saline solution, fixed oils, polyethylene glycols, glycerine, propylene glycol or other synthetic solvents; antibacterial agents such as benzyl alcohol or methyl parabens; antioxidants such as ascorbic acid or sodium bisulfite; chelating agents such as ethylenediaminetetraacetic acid; buffers such as acetates, citrates or phosphates and agents for the adjustment of tonicity such as sodium chloride or dextrose. pH can be adjusted with acids or bases, such as hydrochloric acid or sodium hydroxide. The parenteral preparation can be enclosed in ampoules, disposable syringes or multiple dose vials made of glass or plastic.

[1668] Pharmaceutical compositions suitable for injectable use include sterile aqueous solutions (where water soluble) or dispersions and sterile powders for the extemporaneous preparation of sterile injectable solutions or dispersion. For intravenous administration, suitable carriers include physiological saline, bacteriostatic water, Cremophor EL™ (BASF, Parsippany, N.J.) or phosphate buffered saline (PBS). In all cases, the composition must be sterile and should be fluid to the extent that easy syringeability exists. It must be stable under the conditions of manufacture and storage and must be preserved against the contaminating action of microorganisms such as bacteria and fungi. The carrier can be a solvent or dispersion medium containing, for example, water, ethanol, polyol (for example, glycerol, propylene glycol, and liquid polyetheylene glycol, and the like), and suitable mixtures thereof. The proper fluidity can be maintained, for example, by the use of a coating such as lecithin, by the maintenance of the required particle size in the case of dispersion and by the use of surfactants. Prevention of the action of microorganisms can be achieved by various antibacterial and antifungal agents, for example, parabens, chlorobutanol, phenol, ascorbic acid, thimerosal, and the like. In many cases, it will be preferable to include isotonic agents, for example, sugars, polyalcohols such as manitol, sorbitol, sodium chloride in the composition. Prolonged absorption of the injectable compositions can be brought about by including in the composition an agent which delays absorption, for example, aluminum monostearate and gelatin.

[1669] Sterile injectable solutions can be prepared by incorporating the active compound (e.g., a fragment of an IC47615 protein or an anti-IC47615 antibody) in the required amount in an appropriate solvent with one or a combination of ingredients enumerated above, as required, followed by filtered sterilization. Generally, dispersions are prepared by incorporating the active compound into a sterile vehicle which contains a basic dispersion medium and the required other ingredients from those enumerated above. In the case of sterile powders for the preparation of sterile injectable solutions, the preferred methods of preparation are vacuum drying and freeze-drying which yields a powder of the active ingredient plus any additional desired ingredient from a previously sterile-filtered solution thereof.

[1670] Oral compositions generally include an inert diluent or an edible carrier. They can be enclosed in gelatin capsules or compressed into tablets. For the purpose of oral therapeutic administration, the active compound can be incorporated with excipients and used in the form of tablets, troches, or capsules. Oral compositions can also be prepared using a fluid carrier for use as a mouthwash, wherein the compound in the fluid carrier is applied orally and swished and expectorated or swallowed. Pharmaceutically compatible binding agents, and/or adjuvant materials can be included as part of the composition. The tablets, pills, capsules, troches and the like can contain any of the following ingredients, or compounds of a similar nature: a binder such as microcrystalline cellulose, gum tragacanth or gelatin; an excipient such as starch or lactose, a disintegrating agent such as alginic acid, Primogel, or corn starch; a lubricant such as magnesium stearate or Sterotes; a glidant such as colloidal silicon dioxide; a sweetening agent such as sucrose or saccharin; or a flavoring agent such as peppermint, methyl salicylate, or orange flavoring.

[1671] For administration by inhalation, the compounds are delivered in the form of an aerosol spray from pressured container or dispenser which contains a suitable propellant, e.g., a gas such as carbon dioxide, or a nebulizer.

[1672] Systemic administration can also be by transmucosal or transdermal means. For transmucosal or transdermal administration, penetrants appropriate to the barrier to be permeated are used in the formulation. Such penetrants are generally known in the art, and include, for example, for transmucosal administration, detergents, bile salts, and fusidic acid derivatives. Transmucosal administration can be accomplished through the use of nasal sprays or suppositories. For transdermal administration, the active compounds are formulated into ointments, salves, gels, or creams as generally known in the art.

[1673] The compounds can also be prepared in the form of suppositories (e.g., with conventional suppository bases such as cocoa butter and other glycerides) or retention enemas for rectal delivery.

[1674] In one embodiment, the active compounds are prepared with carriers that will protect the compound against rapid elimination from the body, such as a controlled release formulation, including implants and microencapsulated delivery systems. Biodegradable, biocompatible polymers can be used, such as ethylene vinyl acetate, polyanhydrides, polyglycolic acid, collagen, polyorthoesters, and polylactic acid. Methods for preparation of such formulations will be apparent to those skilled in the art. The materials can also be obtained commercially from Alza Corporation and Nova Pharmaceuticals, Inc. Liposomal suspensions (including liposomes targeted to infected cells with monoclonal antibodies to viral antigens) can also be used as pharmaceutically acceptable carriers. These can be prepared according to methods known to those skilled in the art, for example, as described in U.S. Pat. No. 4,522,811.

[1675] It is especially advantageous to formulate oral or parenteral compositions in dosage unit form for ease of administration and uniformity of dosage. Dosage unit form as used herein refers to physically discrete units suited as unitary dosages for the subject to be treated; each unit containing a predetermined quantity of active compound calculated to produce the desired therapeutic effect in association with the required pharmaceutical carrier. The specification for the dosage unit forms of the invention are dictated by and directly dependent on the unique characteristics of the active compound and the particular therapeutic effect to be achieved, and the limitations inherent in the art of compounding such an active compound for the treatment of individuals.

[1676] Toxicity and therapeutic efficacy of such compounds can be determined by standard pharmaceutical procedures in cell cultures or experimental animals, e.g., for determining the LD50 (the dose lethal to 50% of the population) and the ED50 (the dose therapeutically effective in 50% of the population). The dose ratio between toxic and therapeutic effects is the therapeutic index and it can be expressed as the ratio LD50/ED50. Compounds which exhibit large therapeutic indices are preferred. While compounds that exhibit toxic side effects may be used, care should be taken to design a delivery system that targets such compounds to the site of affected tissue in order to minimize potential damage to uninfected cells and, thereby, reduce side effects.

[1677] The data obtained from the cell culture assays and animal studies can be used in formulating a range of dosage for use in humans. The dosage of such compounds lies preferably within a range of circulating concentrations that include the ED50 with little or no toxicity. The dosage may vary within this range depending upon the dosage form employed and the route of administration utilized. For any compound used in the method of the invention, the therapeutically effective dose can be estimated initially from cell culture assays. A dose may be formulated in animal models to achieve a circulating plasma concentration range that includes the IC50 (i.e., the concentration of the test compound which achieves a half-maximal inhibition of symptoms) as determined in cell culture. Such information can be used to more accurately determine useful doses in humans. Levels in plasma may be measured, for example, by high performance liquid chromatography.

[1678] As defined herein, a therapeutically effective amount of protein or polypeptide (i.e., an effective dosage) ranges from about 0.001 to 30 mg/kg body weight, preferably about 0.01 to 25 mg/kg body weight, more preferably about 0.1 to 20 mg/kg body weight, and even more preferably about 1 to 10 mg/kg, 2 to 9 mg/kg, 3 to 8 mg/kg, 4 to 7 mg/kg, or 5 to 6 mg/kg body weight. The skilled artisan will appreciate that certain factors may influence the dosage required to effectively treat a subject, including but not limited to the severity of the disease or disorder, previous treatments, the general health and/or age of the subject, and other diseases present. Moreover, treatment of a subject with a therapeutically effective amount of a protein, polypeptide, or antibody can include a single treatment or, preferably, can include a series of treatments.

[1679] In a preferred example, a subject is treated with antibody, protein, or polypeptide in the range of between about 0.1 to 20 mg/kg body weight, one time per week for between about 1 to 10 weeks, preferably between 2 to 8 weeks, more preferably between about 3 to 7 weeks, and even more preferably for about 4, 5, or 6 weeks. It will also be appreciated that the effective dosage of antibody, protein, or polypeptide used for treatment may increase or decrease over the course of a particular treatment. Changes in dosage may result and become apparent from the results of diagnostic assays as described herein.

[1680] The present invention encompasses agents which modulate expression or activity. An agent may, for example, be a small molecule. For example, such small molecules include, but are not limited to, peptides, peptidomimetics, amino acids, amino acid analogs, polynucleotides, polynucleotide analogs, nucleotides, nucleotide analogs, organic or inorganic compounds (i.e., including heteroorganic and organometallic compounds) having a molecular weight less than about 10,000 grams per mole, organic or inorganic compounds having a molecular weight less than about 5,000 grams per mole, organic or inorganic compounds having a molecular weight less than about 1,000 grams per mole, organic or inorganic compounds having a molecular weight less than about 500 grams per mole, and salts, esters, and other pharmaceutically acceptable forms of such compounds. It is understood that appropriate doses of small molecule agents depends upon a number of factors within the ken of the ordinarily skilled physician, veterinarian, or researcher. The dose(s) of the small molecule will vary, for example, depending upon the identity, size, and condition of the subject or sample being treated, further depending upon the route by which the composition is to be administered, if applicable, and the effect which the practitioner desires the small molecule to have upon the nucleic acid or polypeptide of the invention.

[1681] Exemplary doses include milligram or microgram amounts of the small molecule per kilogram of subject or sample weight (e.g., about 1 microgram per kilogram to about 500 milligrams per kilogram, about 100 micrograms per kilogram to about 5 milligrams per kilogram, or about 1 microgram per kilogram to about 50 micrograms per kilogram. It is furthermore understood that appropriate doses of a small molecule depend upon the potency of the small molecule with respect to the expression or activity to be modulated. Such appropriate doses may be determined using the assays described herein. When one or more of these small molecules is to be administered to an animal (e.g., a human) in order to modulate expression or activity of a polypeptide or nucleic acid of the invention, a physician, veterinarian, or researcher may, for example, prescribe a relatively low dose at first, subsequently increasing the dose until an appropriate response is obtained. In addition, it is understood that the specific dose level for any particular animal subject will depend upon a variety of factors including the activity of the specific compound employed, the age, body weight, general health, gender, and diet of the subject, the time of administration, the route of administration, the rate of excretion, any drug combination, and the degree of expression or activity to be modulated.

[1682] Further, an antibody (or fragment thereof) may be conjugated to a therapeutic moiety such as a cytotoxin, a therapeutic agent or a radioactive metal ion. A cytotoxin or cytotoxic agent includes any agent that is detrimental to cells. Examples include taxol, cytochalasin B, gramicidin D, ethidium bromide, emetine, mitomycin, etoposide, tenoposide, vincristine, vinblastine, colchicin, doxorubicin, daunorubicin, dihydroxy anthracin dione, mitoxantrone, mithramycin, actinomycin D, 1-dehydrotestosterone, glucocorticoids, procaine, tetracaine, lidocaine, propranolol, and puromycin and analogs or homologs thereof. Therapeutic agents include, but are not limited to, antimetabolites (e.g., methotrexate, 6-mercaptopurine, 6-thioguanine, cytarabine, 5-fluorouracil decarbazine), alkylating agents (e.g., mechlorethamine, thioepa chlorambucil, melphalan, carmustine (BSNU) and lomustine (CCNU), cyclothosphamide, busulfan, dibromomannitol, streptozotocin, mitomycin C, and cis-dichlorodiamine platinum (II) (DDP) cisplatin), anthracyclines (e.g., daunorubicin (formerly daunomycin) and doxorubicin), antibiotics (e.g., dactinomycin (formerly actinomycin), bleomycin, mithramycin, and anthramycin (AMC)), and anti-mitotic agents (e.g., vincristine and vinblastine).

[1683] The conjugates of the invention can be used for modifying a given biological response, the drug moiety is not to be construed as limited to classical chemical therapeutic agents. For example, the drug moiety may be a protein or polypeptide possessing a desired biological activity. Such proteins may include, for example, a toxin such as abrin, ricin A, pseudomonas exotoxin, or diphtheria toxin; a protein such as tumor necrosis factor, alpha-interferon, beta-interferon, nerve growth factor, platelet derived growth factor, tissue plasminogen activator; or, biological response modifiers such as, for example, lymphokines, interleukin-1 (“IL-1”), interleukin-2 (“IL-2”), interleukin-6 (“IL-6”), granulocyte macrophage colony stimulating factor (“GM-CSF”), granulocyte colony stimulating factor (“G-CSF”), or other growth factors.

[1684] Techniques for conjugating such therapeutic moiety to antibodies are well known, see, e.g., Arnon et al., “Monoclonal Antibodies For Immunotargeting Of Drugs In Cancer Therapy”, in Monoclonal Antibodies And Cancer Therapy, Reisfeld et al. (eds.), pp. 243-56 (Alan R. Liss, Inc. 1985); Hellstrom et al., “Antibodies For Drug Delivery”, in Controlled Drug Delivery (2nd Ed.), Robinson et al. (eds.), pp. 623-53 (Marcel Dekker, Inc. 1987); Thorpe, “Antibody Carriers Of Cytotoxic Agents In Cancer Therapy: A Review”, in Monoclonal Antibodies '84: Biological And Clinical Applications, Pinchera et al. (eds.), pp. 475-506 (1985); “Analysis, Results, And Future Prospective Of The Therapeutic Use Of Radiolabeled Antibody In Cancer Therapy”, in Monoclonal Antibodies For Cancer Detection And Therapy, Baldwin et al. (eds.), pp. 303-16 (Academic Press 1985), and Thorpe et al., “The Preparation And Cytotoxic Properties Of Antibody-Toxin Conjugates”, Immunol. Rev. 62:119-58 (1982). Alternatively, an antibody can be conjugated to a second antibody to form an antibody heteroconjugate as described by Segal in U.S. Pat. No. 4,676,980.

[1685] The nucleic acid molecules of the invention can be inserted into vectors and used as gene therapy vectors. Gene therapy vectors can be delivered to a subject by, for example, intravenous injection, local administration (see U.S. Pat. No. 5,328,470) or by stereotactic injection (see e.g., Chen et al. (1994) Proc. Natl. Acad. Sci. USA 91:3054-3057). The pharmaceutical preparation of the gene therapy vector can include the gene therapy vector in an acceptable diluent, or can comprise a slow release matrix in which the gene delivery vehicle is imbedded. Alternatively, where the complete gene delivery vector can be produced intact from recombinant cells, e.g., retroviral vectors, the pharmaceutical preparation can include one or more cells which produce the gene delivery system.

[1686] The pharmaceutical compositions can be included in a container, pack, or dispenser together with instructions for administration.

[1687] V. Uses and Methods of the Invention

[1688] The nucleic acid molecules, proteins, protein homologues, and antibodies described herein can be used in one or more of the following methods: a) screening assays; b) predictive medicine (e.g., diagnostic assays, prognostic assays, monitoring clinical trials, and pharmacogenetics); and c) methods of treatment (e.g., therapeutic and prophylactic). As described herein, an IC47615 protein of the invention has one or more of the following activities: (1) modulates membrane excitability, (2) regulates intracellular ion concentration, (3) modulates membrane polarization (e.g., membrane polarization and/or depolarization), (4) regulates action potential, (5) regulates cellular signal transduction, (6) regulates neurotransmitter release (e.g., from neuronal cells), (7) modulates synaptic transmission, (8) regulates neuronal excitability and/or plasticity, (9) regulates muscle contraction, (10) regulate cell activation and (11) regulates cellular proliferation, growth, migration and/or differentiation.

[1689] The isolated nucleic acid molecules of the invention can be used, for example, to express IC47615 protein (e.g., via a recombinant expression vector in a host cell in gene therapy applications), to detect IC47615 mRNA (e.g., in a biological sample) or a genetic alteration in an IC47615 gene, and to modulate IC47615 activity, as described further below. The IC47615 proteins can be used to treat disorders characterized by insufficient or excessive production of an IC47615 substrate or production of IC47615 inhibitors. In addition, the IC47615 proteins can be used to screen for naturally occurring IC47615 substrates, to screen for drugs or compounds which modulate IC47615 activity, as well as to treat disorders characterized by insufficient or excessive production of IC47615 protein or production of IC47615 protein forms which have decreased, aberrant or unwanted activity compared to IC47615 wild type protein (e.g., proliferative disorders, CNS disorders such as cognitive and neurodegenerative disorders (e.g., Alzheimer's disease, dementias related to Alzheimer's disease (such as Pick's disease), Parkinson's and other Lewy diffuse body diseases, senile dementia, Huntington's disease, Gilles de la Tourette's syndrome, multiple sclerosis, amyotrophic lateral sclerosis, progressive supranuclear palsy, epilepsy, and Jakob-Creutzfieldt disease; autonomic function disorders such as hypertension and sleep disorders, and neuropsychiatric disorders, such as depression, schizophrenia, schizoaffective disorder, korsakoff's psychosis, mania, anxiety disorders, or phobic disorders; learning or memory disorders, e.g., amnesia or age-related memory loss, attention deficit disorder, dysthymic disorder, major depressive disorder, mania, obsessive-compulsive disorder, psychoactive substance use disorders, anxiety, phobias, panic disorder, and bipolar affective disorder (e.g., severe bipolar affective (mood) disorder (BP-1) and bipolar affective neurological disorders (e.g., migraine and obesity)); pain disorders; cardiac disorders (e.g., arteriosclerosis, ischemia reperfusion injury, restenosis, arterial inflammation, vascular wall remodeling, ventricular remodeling, rapid ventricular pacing, coronary microembolism, tachycardia, bradycardia, pressure overload, aortic bending, coronary artery ligation, vascular heart disease, atrial fibrilation, Jervell syndrome, Lange-Nielsen syndrome, long-QT syndrome, congestive heart failure, sinus node dysfunction, angina, heart failure, hypertension, atrial fibrillation, atrial flutter, dilated cardiomyopathy, idiopathic cardiomyopathy, myocardial infarction, coronary artery disease, coronary artery spasm, and arrhythmia), muscular disorders (e.g., paralysis, muscle weakness (e.g., ataxia, myotonia, and myokymia), muscular dystrophy (e.g., Duchenne muscular dystrophy or myotonic dystrophy), spinal muscular atrophy, congenital myopathies, central core disease, rod myopathy, central nuclear myopathy, Lambert-Eaton syndrome, denervation, and infantile spinal muscular atrophy (Werdnig-Hoffman disease), and cellular growth, differentiation, or migration disorders (e.g., cancer, e.g., carcinoma, sarcoma, or leukemia; tumor angiogenesis and metastasis; skeletal dysplasia; neuronal deficiencies resulting from impaired neural induction and patterning; hepatic disorders; cardiovascular disorders; and hematopoietic and/or myeloproliferative disorders). Moreover, the anti-IC47615 antibodies of the invention can be used to detect and isolate IC47615 proteins, regulate the bioavailability of IC47615 proteins, and modulate IC47615 activity.

[1690] A. Screening Assays:

[1691] The invention provides a method (also referred to herein as a “screening assay”) for identifying modulators, i.e., candidate or test compounds or agents (e.g., peptides, peptidomimetics, small molecules or other drugs) which bind to IC47615 proteins, have a stimulatory or inhibitory effect on, for example, IC47615 expression or IC47615 activity, or have a stimulatory or inhibitory effect on, for example, the expression or activity of IC47615 substrate.

[1692] In one embodiment, the invention provides assays for screening candidate or test compounds which are substrates of an IC47615 protein or polypeptide or biologically active portion thereof. In another embodiment, the invention provides assays for screening candidate or test compounds which bind to or modulate the activity of an IC47615 protein or polypeptide or biologically active portion thereof. The test compounds of the present invention can be obtained using any of the numerous approaches in combinatorial library methods known in the art, including: biological libraries; spatially addressable parallel solid phase or solution phase libraries; synthetic library methods requiring deconvolution; the ‘one-bead one-compound’ library method; and synthetic library methods using affinity chromatography selection. The biological library approach is limited to peptide libraries, while the other four approaches are applicable to peptide, non-peptide oligomer or small molecule libraries of compounds (Lam, K. S. (1997) Anticancer Drug Des. 12:145).

[1693] Examples of methods for the synthesis of molecular libraries can be found in the art, for example in: DeWitt et al. (1993) Proc. Natl. Acad. Sci. USA 90:6909; Erb et al. (1994) Proc. Natl. Acad. Sci. USA 91:11422; Zuckermann et al. (1994) J. Med. Chem. 37:2678; Cho et al. (1993) Science 261:1303; Carrell et al. (1994) Angew. Chem. Int. Ed. Engl. 33:2059; Carell et al. (1994) Angew. Chem. Int. Ed. Engl. 33:2061; and in Gallop et al. (1994) J. Med. Chem. 37:1233.

[1694] Libraries of compounds may be presented in solution (e.g, Houghten (1992) Biotechniques 13:412-421), or on beads (Lam (1991) Nature 354:82-84), chips (Fodor (1993) Nature 364:555-556), bacteria (Ladner U.S. Pat. No. 5,223,409), spores (Ladner U.S. Pat. No. '409), plasmids (Cull et al. (1992) Proc. Natl. Acad. Sci. USA 89:1865-1869) or on phage (Scott and Smith (1990) Science 249:386-390); (Devlin (1990) Science 249:404-406); (Cwirla et al. (1990) Proc. Natl. Acad. Sci. USA 87:6378-6382); (Felici (1991) J. Mol. Biol. 222:301-310); (Ladner supra.).

[1695] In one embodiment, an assay is a cell-based assay in which a cell which expresses an IC47615 protein or biologically active portion thereof is contacted with a test compound and the ability of the test compound to modulate IC47615 activity is determined. Determining the ability of the test compound to modulate IC47615 activity can be accomplished by monitoring, for example, the release of a neurotransmitter from a cell which expresses IC47615. The cell, for example, can be of mammalian origin, e.g., a neuronal cell or a thymus cell. The ability of the test compound to modulate IC47615 binding to a substrate or to bind to IC47615 can also be determined. Determining the ability of the test compound to modulate IC47615 binding to a substrate can be accomplished, for example, by coupling the IC47615 substrate with a radioisotope or enzymatic label such that binding of the IC47615 substrate to IC47615 can be determined by detecting the labeled IC47615 substrate in a complex. Alternatively, IC47615 could be coupled with a radioisotope or enzymatic label to monitor the ability of a test compound to modulate IC47615 binding to an IC47615 substrate in a complex. Determining the ability of the test compound to bind IC47615 can be accomplished, for example, by coupling the compound with a radioisotope or enzymatic label such that binding of the compound to IC47615 can be determined by detecting the labeled IC47615 compound in a complex. For example, compounds (e.g., IC47615 substrates) can be labeled with ¹²⁵I, ³⁵S, ¹⁴C, or ³H, either directly or indirectly, and the radioisotope detected by direct counting of radioemission or by scintillation counting. Alternatively, compounds can be enzymatically labeled with, for example, horseradish peroxidase, alkaline phosphatase, or luciferase, and the enzymatic label detected by determination of conversion of an appropriate substrate to product.

[1696] It is also within the scope of this invention to determine the ability of a compound (e.g., an IC47615 substrate) to interact with IC47615 without the labeling of any of the interactants. For example, a microphysiometer can be used to detect the interaction of a compound with IC47615 without the labeling of either the compound or the IC47615. McConnell, H. M. et al. (1992) Science 257:1906-1912. As used herein, a “microphysiometer” (e.g., Cytosensor) is an analytical instrument that measures the rate at which a cell acidifies its environment using a light-addressable potentiometric sensor (LAPS). Changes in this acidification rate can be used as an indicator of the interaction between a compound and IC47615.

[1697] In another embodiment, an assay is a cell-based assay comprising contacting a cell expressing an IC47615 target molecule (e.g., an IC47615 substrate) with a test compound and determining the ability of the test compound to modulate (e.g., stimulate or inhibit) the activity of the IC47615 target molecule. Determining the ability of the test compound to modulate the activity of an IC47615 target molecule can be accomplished, for example, by determining the ability of the IC47615 protein to bind to or interact with the IC47615 target molecule.

[1698] Determining the ability of the IC47615 protein, or a biologically active fragment thereof, to bind to or interact with an IC47615 target molecule can be accomplished by one of the methods described above for determining direct binding. In a preferred embodiment, determining the ability of the IC47615 protein to bind to or interact with an IC47615 target molecule can be accomplished by determining the activity of the target molecule. For example, the activity of the target molecule can be determined by detecting induction of a cellular second messenger of the target (i.e., intracellular Ca²⁺, diacylglycerol, IP₃, and the like), detecting catalytic/enzymatic activity of the target using an appropriate substrate, detecting the induction of a reporter gene (comprising a target-responsive regulatory element operatively linked to a nucleic acid encoding a detectable marker, e.g., luciferase), or detecting a target-regulated cellular response.

[1699] In yet another embodiment, an assay of the present invention is a cell-free assay in which an IC47615 protein or biologically active portion thereof is contacted with a test compound and the ability of the test compound to bind to the IC47615 protein or biologically active portion thereof is determined. Preferred biologically active portions of the IC47615 proteins to be used in assays of the present invention include fragments which participate in interactions with non-IC47615 molecules, e.g., fragments with high surface probability scores (see, for example, FIG. 30). Binding of the test compound to the IC47615 protein can be determined either directly or indirectly as described above. In a preferred embodiment, the assay includes contacting the IC47615 protein or biologically active portion thereof with a known compound which binds IC47615 to form an assay mixture, contacting the assay mixture with a test compound, and determining the ability of the test compound to interact with an IC47615 protein, wherein determining the ability of the test compound to interact with an IC47615 protein comprises determining the ability of the test compound to preferentially bind to IC47615 or biologically active portion thereof as compared to the known compound.

[1700] In another embodiment, the assay is a cell-free assay in which an IC47615 protein or biologically active portion thereof is contacted with a test compound and the ability of the test compound to modulate (e.g., stimulate or inhibit) the activity of the IC47615 protein or biologically active portion thereof is determined. Determining the ability of the test compound to modulate the activity of an IC47615 protein can be accomplished, for example, by determining the ability of the IC47615 protein to bind to an IC47615 target molecule by one of the methods described above for determining direct binding. Determining the ability of the IC47615 protein to bind to an IC47615 target molecule can also be accomplished using a technology such as real-time Biomolecular Interaction Analysis (BIA). Sjolander, S. and Urbaniczky, C. (1991) Anal. Chem. 63:2338-2345 and Szabo et al. (1995) Curr. Opin. Struct. Biol. 5:699-705. As used herein, “BIA” is a technology for studying biospecific interactions in real time, without labeling any of the interactants (e.g., BIAcore). Changes in the optical phenomenon of surface plasmon resonance (SPR) can be used as an indication of real-time reactions between biological molecules.

[1701] In an alternative embodiment, determining the ability of the test compound to modulate the activity of an IC47615 protein can be accomplished by determining the ability of the IC47615 protein to further modulate the activity of a downstream effector of an IC47615 target molecule. For example, the activity of the effector molecule on an appropriate target can be determined or the binding of the effector to an appropriate target can be determined as previously described.

[1702] In yet another embodiment, the cell-free assay involves contacting an IC47615 protein or biologically active portion thereof with a known compound which binds the IC47615 protein to form an assay mixture, contacting the assay mixture with a test compound, and determining the ability of the test compound to interact with the IC47615 protein, wherein determining the ability of the test compound to interact with the IC47615 protein comprises determining the ability of the IC47615protein to preferentially bind to or modulate the activity of an IC47615 target molecule.

[1703] In more than one embodiment of the above assay methods of the present invention, it may be desirable to immobilize either IC47615 or its target molecule to facilitate separation of complexed from uncomplexed forms of one or both of the proteins, as well as to accommodate automation of the assay. Binding of a test compound to an IC47615 protein, or interaction of an IC47615 protein with a target molecule in the presence and absence of a candidate compound, can be accomplished in any vessel suitable for containing the reactants. Examples of such vessels include microtitre plates, test tubes, and micro-centrifuge tubes. In one embodiment, a fusion protein can be provided which adds a domain that allows one or both of the proteins to be bound to a matrix. For example, glutathione-S-transferase/IC47615 fusion proteins or glutathione-S-transferase/target fusion proteins can be adsorbed onto glutathione sepharose beads (Sigma Chemical, St. Louis, Mo.) or glutathione derivatized microtitre plates, which are then combined with the test compound or the test compound and either the non-adsorbed target protein or IC47615 protein, and the mixture incubated under conditions conducive to complex formation (e.g., at physiological conditions for salt and pH). Following incubation, the beads or microtitre plate wells are washed to remove any unbound components, the matrix immobilized in the case of beads, complex determined either directly or indirectly, for example, as described above. Alternatively, the complexes can be dissociated from the matrix, and the level of IC47615 binding or activity determined using standard techniques.

[1704] Other techniques for immobilizing proteins on matrices can also be used in the screening assays of the invention. For example, either an IC47615 protein or an IC47615 target molecule can be immobilized utilizing conjugation of biotin and streptavidin. Biotinylated IC47615 protein or target molecules can be prepared from biotin-NHS (N-hydroxy-succinimide) using techniques known in the art (e.g., biotinylation kit, Pierce Chemicals, Rockford, Ill.), and immobilized in the wells of streptavidin-coated 96 well plates (Pierce Chemical). Alternatively, antibodies reactive with IC47615 protein or target molecules but which do not interfere with binding of the IC47615 protein to its target molecule can be derivatized to the wells of the plate, and unbound target or IC47615 protein trapped in the wells by antibody conjugation. Methods for detecting such complexes, in addition to those described above for the GST-immobilized complexes, include immunodetection of complexes using antibodies reactive with the IC47615 protein or target molecule, as well as enzyme-linked assays which rely on detecting an enzymatic activity associated with the IC47615 protein or target molecule.

[1705] In another embodiment, modulators of IC47615 expression are identified in a method wherein a cell is contacted with a candidate compound and the expression of IC47615 mRNA or protein in the cell is determined. The level of expression of IC47615 mRNA or protein in the presence of the candidate compound is compared to the level of expression of IC47615 mRNA or protein in the absence of the candidate compound. The candidate compound can then be identified as a modulator of IC47615 expression based on this comparison. For example, when expression of IC47615 mRNA or protein is greater (statistically significantly greater) in the presence of the candidate compound than in its absence, the candidate compound is identified as a stimulator of IC47615 mRNA or protein expression. Alternatively, when expression of IC47615 mRNA or protein is less (statistically significantly less) in the presence of the candidate compound than in its absence, the candidate compound is identified as an inhibitor of IC47615 mRNA or protein expression. The level of IC47615 mRNA or protein expression in the cells can be determined by methods described herein for detecting IC47615 mRNA or protein.

[1706] In yet another aspect of the invention, the IC47615 proteins can be used as “bait proteins” in a two-hybrid assay or three-hybrid assay (see, e.g., U.S. Pat. No. 5,283,317; Zervos et al. (1993) Cell 72:223-232; Madura et al. (1993) J. Biol. Chem. 268:12046-12054; Bartel et al. (1993) Biotechniques 14:920-924; Iwabuchi et al. (1993) Oncogene 8:1693-1696; and Brent WO94/10300), to identify other proteins, which bind to or interact with IC47615 (“IC47615-binding proteins” or “IC47615-bp”) and are involved in IC47615 activity. Such IC47615-binding proteins are also likely to be involved in the propagation of signals by the IC47615 proteins or IC47615 targets as, for example, downstream elements of an IC47615-mediated signaling pathway. Alternatively, such IC47615-binding proteins are likely to be IC47615 inhibitors.

[1707] The two-hybrid system is based on the modular nature of most transcription factors, which consist of separable DNA-binding and activation domains. Briefly, the assay utilizes two different DNA constructs. In one construct, the gene that codes for an IC47615 protein is fused to a gene encoding the DNA binding domain of a known transcription factor (e.g., GAL-4). In the other construct, a DNA sequence, from a library of DNA sequences, that encodes an unidentified protein (“prey” or “sample”) is fused to a gene that codes for the activation domain of the known transcription factor. If the “bait” and the “prey” proteins are able to interact, in vivo, forming an IC47615-dependent complex, the DNA-binding and activation domains of the transcription factor are brought into close proximity. This proximity allows transcription of a reporter gene (e.g., LacZ) which is operably linked to a transcriptional regulatory site responsive to the transcription factor. Expression of the reporter gene can be detected and cell colonies containing the functional transcription factor can be isolated and used to obtain the cloned gene which encodes the protein which interacts with the IC47615 protein.

[1708] In another aspect, the invention pertains to a combination of two or more of the assays described herein. For example, a modulating agent can be identified using a cell-based or a cell free assay, and the ability of the agent to modulate the activity of an IC47615 protein can be confirmed in vivo, e.g., in an animal such as an animal model for cellular transformation and/or tumorigenesis.

[1709] This invention further pertains to novel agents identified by the above-described screening assays. Accordingly, it is within the scope of this invention to further use an agent identified as described herein in an appropriate animal model. For example, an agent identified as described herein (e.g., an IC47615 modulating agent, an antisense IC47615 nucleic acid molecule, an IC47615-specific antibody, or an IC47615-binding partner) can be used in an animal model to determine the efficacy, toxicity, or side effects of treatment with such an agent. Alternatively, an agent identified as described herein can be used in an animal model to determine the mechanism of action of such an agent. Furthermore, this invention pertains to uses of novel agents identified by the above-described screening assays for treatments as described herein.

[1710] B. Detection Assays

[1711] Portions or fragments of the cDNA sequences identified herein (and the corresponding complete gene sequences) can be used in numerous ways as polynucleotide reagents. For example, these sequences can be used to: (i) map their respective genes on a chromosome; and, thus, locate gene regions associated with genetic disease; (ii) identify an individual from a minute biological sample (tissue typing); and (iii) aid in forensic identification of a biological sample. These applications are described in the subsections below.

[1712] 1. Chromosome Mapping

[1713] Once the sequence (or a portion of the sequence) of a gene has been isolated, this sequence can be used to map the location of the gene on a chromosome. This process is called chromosome mapping. Accordingly, portions or fragments of the IC47615 nucleotide sequences, described herein, can be used to map the location of the IC47615 genes on a chromosome. The mapping of the IC47615 sequences to chromosomes is an important first step in correlating these sequences with genes associated with disease.

[1714] Briefly, IC47615 genes can be mapped to chromosomes by preparing PCR primers (preferably 15-25 bp in length) from the IC47615 nucleotide sequences. Computer analysis of the IC47615 sequences can be used to predict primers that do not span more than one exon in the genomic DNA, thus complicating the amplification process. These primers can then be used for PCR screening of somatic cell hybrids containing individual human chromosomes. Only those hybrids containing the human gene corresponding to the IC47615 sequences will yield an amplified fragment.

[1715] Somatic cell hybrids are prepared by fusing somatic cells from different mammals (e.g., human and mouse cells). As hybrids of human and mouse cells grow and divide, they gradually lose human chromosomes in random order, but retain the mouse chromosomes. By using media in which mouse cells cannot grow, because they lack a particular enzyme, but human cells can, the one human chromosome that contains the gene encoding the needed enzyme, will be retained. By using various media, panels of hybrid cell lines can be established. Each cell line in a panel contains either a single human chromosome or a small number of human chromosomes, and a full set of mouse chromosomes, allowing easy mapping of individual genes to specific human chromosomes. (D'Eustachio P. et al. (1983) Science 220:919-924). Somatic cell hybrids containing only fragments of human chromosomes can also be produced by using human chromosomes with translocations and deletions.

[1716] PCR mapping of somatic cell hybrids is a rapid procedure for assigning a particular sequence to a particular chromosome. Three or more sequences can be assigned per day using a single thermal cycler. Using the IC47615 nucleotide sequences to design oligonucleotide primers, sublocalization can be achieved with panels of fragments from specific chromosomes. Other mapping strategies which can similarly be used to map an IC47615 sequence to its chromosome include in situ hybridization (described in Fan, Y. et al. (1990) Proc. Natl. Acad. Sci. USA 87:6223-27), pre-screening with labeled flow-sorted chromosomes, and pre-selection by hybridization to chromosome specific cDNA libraries.

[1717] Fluorescence in situ hybridization (FISH) of a DNA sequence to a metaphase chromosomal spread can further be used to provide a precise chromosomal location in one step. Chromosome spreads can be made using cells whose division has been blocked in metaphase by a chemical such as colcemid that disrupts the mitotic spindle. The chromosomes can be treated briefly with trypsin, and then stained with Giemsa. A pattern of light and dark bands develops on each chromosome, so that the chromosomes can be identified individually. The FISH technique can be used with a DNA sequence as short as 500 or 600 bases. However, clones larger than 1,000 bases have a higher likelihood of binding to a unique chromosomal location with sufficient signal intensity for simple detection. Preferably 1,000 bases, and more preferably 2,000 bases will suffice to get good results at a reasonable amount of time. For a review of this technique, see Verma et al, Human Chromosomes: A Manual of Basic Techniques (Pergamon Press, New York 1988).

[1718] Reagents for chromosome mapping can be used individually to mark a single chromosome or a single site on that chromosome, or panels of reagents can be used for marking multiple sites and/or multiple chromosomes. Reagents corresponding to noncoding regions of the genes actually are preferred for mapping purposes. Coding sequences are more likely to be conserved within gene families, thus increasing the chance of cross hybridizations during chromosomal mapping.

[1719] Once a sequence has been mapped to a precise chromosomal location, the physical position of the sequence on the chromosome can be correlated with genetic map data. (Such data are found, for example, in V. McKusick, Mendelian Inheritance in Man, available on-line through Johns Hopkins University Welch Medical Library). The relationship between a gene and a disease, mapped to the same chromosomal region, can then be identified through linkage analysis (co-inheritance of physically adjacent genes), described in, for example, Egeland, J. et al. (1987) Nature, 325:783-787.

[1720] Moreover, differences in the DNA sequences between individuals affected and unaffected with a disease associated with the IC47615 gene can be determined. If a mutation is observed in some or all of the affected individuals but not in any unaffected individuals, then the mutation is likely to be the causative agent of the particular disease. Comparison of affected and unaffected individuals generally involves first looking for structural alterations in the chromosomes, such as deletions or translocations that are visible from chromosome spreads or detectable using PCR based on that DNA sequence. Ultimately, complete sequencing of genes from several individuals can be performed to confirm the presence of a mutation and to distinguish mutations from polymorphisms.

[1721] 2. Tissue Typing

[1722] The IC47615 sequences of the present invention can also be used to identify individuals from minute biological samples. The United States military, for example, is considering the use of restriction fragment length polymorphism (RFLP) for identification of its personnel. In this technique, an individual's genomic DNA is digested with one or more restriction enzymes, and probed on a Southern blot to yield unique bands for identification. This method does not suffer from the current limitations of “Dog Tags” which can be lost, switched, or stolen, making positive identification difficult. The sequences of the present invention are useful as additional DNA markers for RFLP (described in U.S. Pat. No. 5,272,057).

[1723] Furthermore, the sequences of the present invention can be used to provide an alternative technique which determines the actual base-by-base DNA sequence of selected portions of an individual's genome. Thus, the IC47615 nucleotide sequences described herein can be used to prepare two PCR primers from the 5′ and 3′ ends of the sequences. These primers can then be used to amplify an individual's DNA and subsequently sequence it.

[1724] Panels of corresponding DNA sequences from individuals, prepared in this manner, can provide unique individual identifications, as each individual will have a unique set of such DNA sequences due to allelic differences. The sequences of the present invention can be used to obtain such identification sequences from individuals and from tissue. The IC47615 nucleotide sequences of the invention uniquely represent portions of the human genome. Allelic variation occurs to some degree in the coding regions of these sequences, and to a greater degree in the noncoding regions. It is estimated that allelic variation between individual humans occurs with a frequency of about once per each 500 bases. Each of the sequences described herein can, to some degree, be used as a standard against which DNA from an individual can be compared for identification purposes. Because greater numbers of polymorphisms occur in the noncoding regions, fewer sequences are necessary to differentiate individuals. The noncoding sequences of SEQ ID NO:34 can comfortably provide positive individual identification with a panel of perhaps 10 to 1,000 primers which each yield a noncoding amplified sequence of 100 bases. If predicted coding sequences, such as that in SEQ ID NO:36 are used, a more appropriate number of primers for positive individual identification would be 500-2,000.

[1725] If a panel of reagents from IC47615 nucleotide sequences described herein is used to generate a unique identification database for an individual, those same reagents can later be used to identify tissue from that individual. Using the unique identification database, positive identification of the individual, living or dead, can be made from extremely small tissue samples.

[1726] 3. Use of IC47615 Sequences in Forensic Biology

[1727] DNA-based identification techniques can also be used in forensic biology. Forensic biology is a scientific field employing genetic typing of biological evidence found at a crime scene as a means for positively identifying, for example, a perpetrator of a crime. To make such an identification, PCR technology can be used to amplify DNA sequences taken from very small biological samples such as tissues, e.g., hair or skin, or body fluids, e.g., blood, saliva, or semen found at a crime scene. The amplified sequence can then be compared to a standard, thereby allowing identification of the origin of the biological sample.

[1728] The sequences of the present invention can be used to provide polynucleotide reagents, e.g., PCR primers, targeted to specific loci in the human genome, which can enhance the reliability of DNA-based forensic identifications by, for example, providing another “identification marker” (i.e. another DNA sequence that is unique to a particular individual). As mentioned above, actual base sequence information can be used for identification as an accurate alternative to patterns formed by restriction enzyme generated fragments. Sequences targeted to noncoding regions of SEQ ID NO:34 are particularly appropriate for this use as greater numbers of polymorphisms occur in the noncoding regions, making it easier to differentiate individuals using this technique. Examples of polynucleotide reagents include the IC47615 nucleotide sequences or portions thereof, e.g., fragments derived from the noncoding regions of SEQ ID NO:34 having a length of at least 20 bases, preferably at least 30 bases.

[1729] The IC47615 nucleotide sequences described herein can further be used to provide polynucleotide reagents, e.g., labeled or labelable probes which can be used in, for example, an in situ hybridization technique, to identify a specific tissue, e.g., thymus or brain tissue. This can be very useful in cases where a forensic pathologist is presented with a tissue of unknown origin. Panels of such IC47615 probes can be used to identify tissue by species and/or by organ type.

[1730] In a similar fashion, these reagents, e.g., IC47615 primers or probes can be used to screen tissue culture for contamination (i.e., screen for the presence of a mixture of different types of cells in a culture).

[1731] C. Predictive Medicine:

[1732] The present invention also pertains to the field of predictive medicine in which diagnostic assays, prognostic assays, and monitoring clinical trials are used for prognostic (predictive) purposes to thereby treat an individual prophylactically. Accordingly, one aspect of the present invention relates to diagnostic assays for determining IC47615 protein and/or nucleic acid expression as well as IC47615 activity, in the context of a biological sample (e.g., blood, serum, cells, tissue) to thereby determine whether an individual is afflicted with a disease or disorder, or is at risk of developing a disorder, associated with aberrant or unwanted IC47615 expression or activity. The invention also provides for prognostic (or predictive) assays for determining whether an individual is at risk of developing a disorder associated with IC47615 protein, nucleic acid expression or activity. For example, mutations in an IC47615 gene can be assayed in a biological sample. Such assays can be used for prognostic or predictive purpose to thereby prophylactically treat an individual prior to the onset of a disorder characterized by or associated with IC47615 protein, nucleic acid expression or activity.

[1733] Another aspect of the invention pertains to monitoring the influence of agents (e.g., drugs, compounds) on the expression or activity of IC47615 in clinical trials.

[1734] These and other agents are described in further detail in the following sections.

[1735] 1. Diagnostic Assays

[1736] An exemplary method for detecting the presence or absence of IC47615 protein or nucleic acid in a biological sample involves obtaining a biological sample from a test subject and contacting the biological sample with a compound or an agent capable of detecting IC47615 protein or nucleic acid (e.g., mRNA, or genomic DNA) that encodes IC47615 protein such that the presence of IC47615 protein or nucleic acid is detected in the biological sample. A preferred agent for detecting IC47615 mRNA or genomic DNA is a labeled nucleic acid probe capable of hybridizing to IC47615 mRNA or genomic DNA. The nucleic acid probe can be, for example, the IC47615 nucleic acid set forth in SEQ ID NO:34 or 36, or the DNA insert of the plasmid deposited with ATCC as Accession Number ______, or a portion thereof, such as an oligonucleotide of at least 15, 30, 50, 100, 250 or 500 nucleotides in length and sufficient to specifically hybridize under stringent conditions to IC47615 mRNA or genomic DNA. Other suitable probes for use in the diagnostic assays of the invention are described herein.

[1737] A preferred agent for detecting IC47615 protein is an antibody capable of binding to IC47615 protein, preferably an antibody with a detectable label. Antibodies can be polyclonal, or more preferably, monoclonal. An intact antibody, or a fragment thereof (e.g., Fab or F(ab′)₂) can be used. The term “labeled”, with regard to the probe or antibody, is intended to encompass direct labeling of the probe or antibody by coupling (i.e., physically linking) a detectable substance to the probe or antibody, as well as indirect labeling of the probe or antibody by reactivity with another reagent that is directly labeled. Examples of indirect labeling include detection of a primary antibody using a fluorescently labeled secondary antibody and end-labeling of a DNA probe with biotin such that it can be detected with fluorescently labeled streptavidin. The term “biological sample” is intended to include tissues, cells and biological fluids isolated from a subject, as well as tissues, cells and fluids present within a subject. That is, the detection method of the invention can be used to detect IC47615 mRNA, protein, or genomic DNA in a biological sample in vitro as well as in vivo. For example, in vitro techniques for detection of IC47615 mRNA include Northern hybridizations and in situ hybridizations. In vitro techniques for detection of IC47615 protein include enzyme linked immunosorbent assays (ELISAs), Western blots, immunoprecipitations and immunofluorescence. In vitro techniques for detection of IC47615 genomic DNA include Southern hybridizations. Furthermore, in vivo techniques for detection of IC47615 protein include introducing into a subject a labeled anti-IC47615 antibody. For example, the antibody can be labeled with a radioactive marker whose presence and location in a subject can be detected by standard imaging techniques.

[1738] In one embodiment, the biological sample contains protein molecules from the test subject. Alternatively, the biological sample can contain mRNA molecules from the test subject or genomic DNA molecules from the test subject. A preferred biological sample is a serum sample isolated by conventional means from a subject.

[1739] In another embodiment, the methods further involve obtaining a control biological sample from a control subject, contacting the control sample with a compound or agent capable of detecting IC47615 protein, mRNA, or genomic DNA, such that the presence of IC47615 protein, mRNA or genomic DNA is detected in the biological sample, and comparing the presence of IC47615 protein, mRNA or genomic DNA in the control sample with the presence of IC47615 protein, mRNA or genomic DNA in the test sample.

[1740] The invention also encompasses kits for detecting the presence of IC47615 in a biological sample. For example, the kit can comprise a labeled compound or agent capable of detecting IC47615 protein or mRNA in a biological sample; means for determining the amount of IC47615 in the sample; and means for comparing the amount of IC47615 in the sample with a standard. The compound or agent can be packaged in a suitable container. The kit can further comprise instructions for using the kit to detect IC47615 protein or nucleic acid.

[1741] 2. Prognostic Assays

[1742] The diagnostic methods described herein can furthermore be utilized to identify subjects having or at risk of developing a disease or disorder associated with aberrant or unwanted IC47615 expression or activity. As used herein, the term “aberrant” includes an IC47615 expression or activity which deviates from the wild type IC47615 expression or activity. Aberrant expression or activity includes increased or decreased expression or activity, as well as expression or activity which does not follow the wild type developmental pattern of expression or the subcellular pattern of expression. For example, aberrant IC47615 expression or activity is intended to include the cases in which a mutation in the IC47615 gene causes the IC47615 gene to be under-expressed or over-expressed and situations in which such mutations result in a non-functional IC47615 protein or a protein which does not function in a wild-type fashion, e.g., a protein which does not interact with an IC47615 substrate, e.g., a non-IC47615 channel subunit or ligand, or one which interacts with a non-IC47615 substrate, e.g. a non-IC47615 channel subunit or ligand. As used herein, the term “unwanted” includes an unwanted phenomenon involved in a biological response such as cellular proliferation. For example, the term unwanted includes an IC47615 expression or activity which is undesirable in a subject.

[1743] The assays described herein, such as the preceding diagnostic assays or the following assays, can be utilized to identify a subject having or at risk of developing a disorder associated with a misregulation in IC47615 protein activity or nucleic acid expression, such as a CNS disorder (e.g., a cognitive or neurodegenerative disorder), a pain disorder, a muscular disorder, a cellular proliferation, growth, differentiation, or migration disorder, or a cardiovascular disorder. Alternatively, the prognostic assays can be utilized to identify a subject having or at risk for developing a disorder associated with a misregulation in IC47615 protein activity or nucleic acid expression, such as a CNS disorder, a pain disorder, a cellular proliferation, growth, differentiation, or migration disorder, a muscular disorder, or a cardiovascular disorder. Thus, the present invention provides a method for identifying a disease or disorder associated with aberrant or unwanted IC47615 expression or activity in which a test sample is obtained from a subject and IC47615 protein or nucleic acid (e.g., mRNA or genomic DNA) is detected, wherein the presence of IC47615 protein or nucleic acid is diagnostic for a subject having or at risk of developing a disease or disorder associated with aberrant or unwanted IC47615 expression or activity. As used herein, a “test sample” refers to a biological sample obtained from a subject of interest. For example, a test sample can be a biological fluid (e.g., cerebrospinal fluid or serum), cell sample, or tissue.

[1744] Furthermore, the prognostic assays described herein can be used to determine whether a subject can be administered an agent (e.g., an agonist, antagonist, peptidomimetic, protein, peptide, nucleic acid, small molecule, or other drug candidate) to treat a disease or disorder associated with aberrant or unwanted IC47615 expression or activity. For example, such methods can be used to determine whether a subject can be effectively treated with an agent for a CNS disorder, a pain disorder, a muscular disorder, a cardiovascular disorder, or a cellular proliferation, growth, differentiation, or migration disorder. Thus, the present invention provides methods for determining whether a subject can be effectively treated with an agent for a disorder associated with aberrant or unwanted IC47615 expression or activity in which a test sample is obtained and IC47615 protein or nucleic acid expression or activity is detected (e.g., wherein the abundance of IC47615 protein or nucleic acid expression or activity is diagnostic for a subject that can be administered the agent to treat a disorder associated with aberrant or unwanted IC47615 expression or activity).

[1745] The methods of the invention can also be used to detect genetic alterations in an IC47615 gene, thereby determining if a subject with the altered gene is at risk for a disorder characterized by misregulation in IC47615 protein activity or nucleic acid expression, such as a CNS disorder, a pain disorder, a cellular proliferation, growth, differentiation, or migration disorder, a muscular disorder, or cardiovascular disorder. In preferred embodiments, the methods include detecting, in a sample of cells from the subject, the presence or absence of a genetic alteration characterized by at least one of an alteration affecting the integrity of a gene encoding an IC47615-protein, or the mis-expression of the IC47615 gene. For example, such genetic alterations can be detected by ascertaining the existence of at least one of 1) a deletion of one or more nucleotides from an IC47615 gene; 2) an addition of one or more nucleotides to an IC47615 gene; 3) a substitution of one or more nucleotides of an IC47615 gene, 4) a chromosomal rearrangement of an IC47615 gene; 5) an alteration in the level of a messenger RNA transcript of an IC47615 gene, 6) aberrant modification of an IC47615 gene, such as of the methylation pattern of the genomic DNA, 7) the presence of a non-wild type splicing pattern of a messenger RNA transcript of an IC47615 gene, 8) a non-wild type level of an IC47615-protein, 9) allelic loss of an IC47615 gene, and 10) inappropriate post-translational modification of an IC47615-protein. As described herein, there are a large number of assays known in the art which can be used for detecting alterations in an IC47615 gene. A preferred biological sample is a tissue or serum sample isolated by conventional means from a subject.

[1746] In certain embodiments, detection of the alteration involves the use of a probe/primer in a polymerase chain reaction (PCR) (see, e.g., U.S. Pat. Nos. 4,683,195 and 4,683,202), such as anchor PCR or RACE PCR, or, alternatively, in a ligation chain reaction (LCR) (see, e.g., Landegran et al. (1988) Science 241:1077-1080; and Nakazawa et al. (1994) Proc. Natl. Acad. Sci. USA 91:360-364), the latter of which can be particularly useful for detecting point mutations in the IC47615-gene (see Abravaya et al. (1995) Nucleic Acids Res. 23:675-682). This method can include the steps of collecting a sample of cells from a subject, isolating nucleic acid (e.g., genomic, mRNA or both) from the cells of the sample, contacting the nucleic acid sample with one or more primers which specifically hybridize to an IC47615 gene under conditions such that hybridization and amplification of the IC47615-gene (if present) occurs, and detecting the presence or absence of an amplification product, or detecting the size of the amplification product and comparing the length to a control sample. It is anticipated that PCR and/or LCR may be desirable to use as a preliminary amplification step in conjunction with any of the techniques used for detecting mutations described herein.

[1747] Alternative amplification methods include: self sustained sequence replication (Guatelli, J. C. et al. (1990) Proc. Natl. Acad. Sci. USA 87:1874-1878), transcriptional amplification system (Kwoh, D. Y. et al. (1989) Proc. Natl. Acad. Sci. USA 86:1173-1177), Q-Beta Replicase (Lizardi, P. M. et al. (1988) Bio-Technology 6:1197), or any other nucleic acid amplification method, followed by the detection of the amplified molecules using techniques well known to those of skill in the art. These detection schemes are especially useful for the detection of nucleic acid molecules if such molecules are present in very low numbers.

[1748] In an alternative embodiment, mutations in an IC47615 gene from a sample cell can be identified by alterations in restriction enzyme cleavage patterns. For example, sample and control DNA is isolated, amplified (optionally), digested with one or more restriction endonucleases, and fragment length sizes are determined by gel electrophoresis and compared. Differences in fragment length sizes between sample and control DNA indicates mutations in the sample DNA. Moreover, the use of sequence specific ribozymes (see, for example, U.S. Pat. No. 5,498,531) can be used to score for the presence of specific mutations by development or loss of a ribozyme cleavage site.

[1749] In other embodiments, genetic mutations in IC47615 can be identified by hybridizing a sample and control nucleic acids, e.g., DNA or RNA, to high density arrays containing hundreds or thousands of oligonucleotides probes (Cronin, M. T. et al. (1996) Hum. Mutat. 7:244-255; Kozal, M. J. et al. (1996) Nat. Med. 2:753-759). For example, genetic mutations in IC47615 can be identified in two dimensional arrays containing light-generated DNA probes as described in Cronin et al. (1996) supra. Briefly, a first hybridization array of probes can be used to scan through long stretches of DNA in a sample and control to identify base changes between the sequences by making linear arrays of sequential overlapping probes. This step allows the identification of point mutations. This step is followed by a second hybridization array that allows the characterization of specific mutations by using smaller, specialized probe arrays complementary to all variants or mutations detected. Each mutation array is composed of parallel probe sets, one complementary to the wild-type gene and the other complementary to the mutant gene.

[1750] In yet another embodiment, any of a variety of sequencing reactions known in the art can be used to directly sequence the IC47615 gene and detect mutations by comparing the sequence of the sample IC47615 with the corresponding wild-type (control) sequence. Examples of sequencing reactions include those based on techniques developed by Maxam and Gilbert ((1977) Proc. Natl. Acad. Sci. USA 74:560) or Sanger ((1977) Proc. Natl. Acad. Sci. USA 74:5463). It is also contemplated that any of a variety of automated sequencing procedures can be utilized when performing the diagnostic assays ((1995) Biotechniques 19:448), including sequencing by mass spectrometry (see, e.g., PCT International Publication No. WO 94/16101; Cohen et al. (1996) Adv. Chromatogr. 36:127-162; and Griffin et al. (1993) Appl. Biochem. Biotechnol. 38:147-159).

[1751] Other methods for detecting mutations in the IC47615 gene include methods in which protection from cleavage agents is used to detect mismatched bases in RNA/RNA or RNA/DNA heteroduplexes (Myers et al. (1985) Science 230:1242). In general, the art technique of “mismatch cleavage” starts by providing heteroduplexes of formed by hybridizing (labeled) RNA or DNA containing the wild-type IC47615 sequence with potentially mutant RNA or DNA obtained from a tissue sample. The double-stranded duplexes are treated with an agent which cleaves single-stranded regions of the duplex such as which will exist due to basepair mismatches between the control and sample strands. For instance, RNA/DNA duplexes can be treated with RNase and DNA/DNA hybrids treated with S1 nuclease to enzymatically digesting the mismatched regions. In other embodiments, either DNA/DNA or RNA/DNA duplexes can be treated with hydroxylamine or osmium tetroxide and with piperidine in order to digest mismatched regions. After digestion of the mismatched regions, the resulting material is then separated by size on denaturing polyacrylamide gels to determine the site of mutation. See, for example, Cotton et al. (1988) Proc. Natl. Acad. Sci. USA 85:4397; Saleeba et al. (1992) Methods Enzymol. 217:286-295. In a preferred embodiment, the control DNA or RNA can be labeled for detection.

[1752] In still another embodiment, the mismatch cleavage reaction employs one or more proteins that recognize mismatched base pairs in double-stranded DNA (so called “DNA mismatch repair” enzymes) in defined systems for detecting and mapping point mutations in IC47615 cDNAs obtained from samples of cells. For example, the mutY enzyme of E. coli cleaves A at G/A mismatches and the thymidine DNA glycosylase from HeLa cells cleaves T at G/T mismatches (Hsu et al. (1994) Carcinogenesis 15:1657-1662). According to an exemplary embodiment, a probe based on an IC47615 sequence, e.g., a wild-type IC47615 sequence, is hybridized to a cDNA or other DNA product from a test cell(s). The duplex is treated with a DNA mismatch repair enzyme, and the cleavage products, if any, can be detected from electrophoresis protocols or the like. See, for example, U.S. Pat. No. 5,459,039.

[1753] In other embodiments, alterations in electrophoretic mobility will be used to identify mutations in IC47615 genes. For example, single strand conformation polymorphism (SSCP) may be used to detect differences in electrophoretic mobility between mutant and wild type nucleic acids (Orita et al. (1989) Proc. Natl. Acad. Sci. USA 86:2766, see also Cotton (1993) Mutat. Res. 285:125-144; and Hayashi (1992) Genet. Anal. Tech. Appl. 9:73-79). Single-stranded DNA fragments of sample and control IC47615 nucleic acids will be denatured and allowed to renature. The secondary structure of single-stranded nucleic acids varies according to sequence, the resulting alteration in electrophoretic mobility enables the detection of even a single base change. The DNA fragments may be labeled or detected with labeled probes. The sensitivity of the assay may be enhanced by using RNA (rather than DNA), in which the secondary structure is more sensitive to a change in sequence. In a preferred embodiment, the subject method utilizes heteroduplex analysis to separate double stranded heteroduplex molecules on the basis of changes in electrophoretic mobility (Keen et al. (1991) Trends Genet 7:5).

[1754] In yet another embodiment the movement of mutant or wild-type fragments in polyacrylamide gels containing a gradient of denaturant is assayed using denaturing gradient gel electrophoresis (DGGE) (Myers et al. (1985) Nature 313:495). When DGGE is used as the method of analysis, DNA will be modified to insure that it does not completely denature, for example by adding a GC clamp of approximately 40 bp of high-melting GC-rich DNA by PCR. In a further embodiment, a temperature gradient is used in place of a denaturing gradient to identify differences in the mobility of control and sample DNA (Rosenbaum and Reissner (1987) Biophys Chem 265:12753).

[1755] Examples of other techniques for detecting point mutations include, but are not limited to, selective oligonucleotide hybridization, selective amplification, or selective primer extension. For example, oligonucleotide primers may be prepared in which the known mutation is placed centrally and then hybridized to target DNA under conditions which permit hybridization only if a perfect match is found (Saiki et al. (1986) Nature 324:163); Saiki et al. (1989) Proc. Natl. Acad. Sci. USA 86:6230). Such allele specific oligonucleotides are hybridized to PCR amplified target DNA or a number of different mutations when the oligonucleotides are attached to the hybridizing membrane and hybridized with labeled target DNA.

[1756] Alternatively, allele specific amplification technology which depends on selective PCR amplification may be used in conjunction with the instant invention. Oligonucleotides used as primers for specific amplification may carry the mutation of interest in the center of the molecule (so that amplification depends on differential hybridization) (Gibbs et al. (1989) Nucleic Acids Res. 17:2437-2448) or at the extreme 3′ end of one primer where, under appropriate conditions, mismatch can prevent, or reduce polymerase extension (Prossner (1993) Tibtech 11:238). In addition it may be desirable to introduce a novel restriction site in the region of the mutation to create cleavage-based detection (Gasparini et al. (1992) Mol. Cell Probes 6:1). It is anticipated that in certain embodiments amplification may also be performed using Taq ligase for amplification (Barany (1991) Proc. Natl. Acad. Sci USA 88:189). In such cases, ligation will occur only if there is a perfect match at the 3′ end of the 5′ sequence making it possible to detect the presence of a known mutation at a specific site by looking for the presence or absence of amplification.

[1757] The methods described herein may be performed, for example, by utilizing pre-packaged diagnostic kits comprising at least one probe nucleic acid or antibody reagent described herein, which may be conveniently used, e.g., in clinical settings to diagnose patients exhibiting symptoms or family history of a disease or illness involving an IC47615 gene.

[1758] Furthermore, any cell type or tissue in which IC47615 is expressed may be utilized in the prognostic assays described herein.

[1759] 3. Monitoring of Effects During Clinical Trials

[1760] Monitoring the influence of agents (e.g., drugs) on the expression or activity of an IC47615 protein (e.g., the modulation of cell proliferation and/or migration) can be applied not only in basic drug screening, but also in clinical trials. For example, the effectiveness of an agent determined by a screening assay as described herein to increase IC47615 gene expression, protein levels, or upregulate IC47615 activity, can be monitored in clinical trials of subjects exhibiting decreased IC47615 gene expression, protein levels, or downregulated IC47615 activity. Alternatively, the effectiveness of an agent determined by a screening assay to decrease IC47615 gene expression, protein levels, or downregulate IC47615 activity, can be monitored in clinical trials of subjects exhibiting increased IC47615 gene expression, protein levels, or upregulated IC47615 activity. In such clinical trials, the expression or activity of an IC47615 gene, and preferably, other genes that have been implicated in, for example, an IC47615-associated disorder can be used as a “read out” or markers of the phenotype of a particular cell.

[1761] For example, and not by way of limitation, genes, including IC47615, that are modulated in cells by treatment with an agent (e.g., compound, drug or small molecule) which modulates IC47615 activity (e.g., identified in a screening assay as described herein) can be identified. Thus, to study the effect of agents on IC47615-associated disorders (e.g., disorders characterized by deregulated cell proliferation and/or migration), for example, in a clinical trial, cells can be isolated and RNA prepared and analyzed for the levels of expression of IC47615 and other genes implicated in the IC47615-associated disorder, respectively. The levels of gene expression (e.g., a gene expression pattern) can be quantified by northern blot analysis or RT-PCR, as described herein, or alternatively by measuring the amount of protein produced, by one of the methods as described herein, or by measuring the levels of activity of IC47615 or other genes. In this way, the gene expression pattern can serve as a marker, indicative of the physiological response of the cells to the agent. Accordingly, this response state may be determined before, and at various points during treatment of the individual with the agent.

[1762] In a preferred embodiment, the present invention provides a method for monitoring the effectiveness of treatment of a subject with an agent (e.g., an agonist, antagonist, peptidomimetic, protein, peptide, nucleic acid, small molecule, or other drug candidate identified by the screening assays described herein) including the steps of (i) obtaining a pre-administration sample from a subject prior to administration of the agent; (ii) detecting the level of expression of an IC47615 protein, mRNA, or genomic DNA in the preadministration sample; (iii) obtaining one or more post-administration samples from the subject; (iv) detecting the level of expression or activity of the IC47615 protein, mRNA, or genomic DNA in the post-administration samples; (v) comparing the level of expression or activity of the IC47615 protein, mRNA, or genomic DNA in the pre-administration sample with the IC47615 protein, mRNA, or genomic DNA in the post administration sample or samples; and (vi) altering the administration of the agent to the subject accordingly. For example, increased administration of the agent may be desirable to increase the expression or activity of IC47615 to higher levels than detected, i.e., to increase the effectiveness of the agent. Alternatively, decreased administration of the agent may be desirable to decrease expression or activity of IC47615 to lower levels than detected, i.e., to decrease the effectiveness of the agent. According to such an embodiment, IC47615 expression or activity may be used as an indicator of the effectiveness of an agent, even in the absence of an observable phenotypic response.

[1763] D. Methods of Treatment:

[1764] The present invention provides for both prophylactic and therapeutic methods of treating a subject at risk of (or susceptible to) a disorder or having a disorder associated with aberrant or unwanted IC47615 expression or activity, e.g., a CNS disorder, a pain disorder, a cellular proliferation, growth, differentiation, or migration disorder, a muscular disorder, or a cardiovascular disorder. As used herein, “treatment” of a subject includes the application or administration of a therapeutic agent to a subject, or application or administration of a therapeutic agent to a cell or tissue from a subject, who has a diseases or disorder, has a symptom of a disease or disorder, or is at risk of (or susceptible to) a disease or disorder, with the purpose to cure, heal, alleviate, relieve, alter, remedy, ameliorate, improve, or affect the disease or disorder, the symptom of the disease or disorder, or the risk of (or susceptibility to) the disease or disorder. As used herein, a “therapeutic agent” includes, but is not limited to, small molecules, peptides, polypeptides, antibodies, ribozymes, and antisense oligonucleotides.

[1765] With regards to both prophylactic and therapeutic methods of treatment, such treatments may be specifically tailored or modified, based on knowledge obtained from the field of pharmacogenomics. “Pharmacogenomics”, as used herein, refers to the application of genomics technologies such as gene sequencing, statistical genetics, and gene expression analysis to drugs in clinical development and on the market. More specifically, the term refers the study of how a patient's genes determine his or her response to a drug (e.g., a patient's “drug response phenotype”, or “drug response genotype”). Thus, another aspect of the invention provides methods for tailoring an individual's prophylactic or therapeutic treatment with either the IC47615 molecules of the present invention or IC47615 modulators according to that individual's drug response genotype. Pharmacogenomics allows a clinician or physician to target prophylactic or therapeutic treatments to patients who will most benefit from the treatment and to avoid treatment of patients who will experience toxic drug-related side effects.

[1766] 1. Prophylactic Methods

[1767] In one aspect, the invention provides a method for preventing in a subject, a disease or condition associated with an aberrant or unwanted IC47615 expression or activity, by administering to the subject an IC47615 or an agent which modulates IC47615 expression or at least one IC47615 activity. Subjects at risk for a disease which is caused or contributed to by aberrant or unwanted IC47615 expression or activity can be identified by, for example, any or a combination of diagnostic or prognostic assays as described herein. Administration of a prophylactic agent can occur prior to the manifestation of symptoms characteristic of the IC47615 aberrancy, such that a disease or disorder is prevented or, alternatively, delayed in its progression. Depending on the type of IC47615 aberrancy, for example, an IC47615, IC47615 agonist or IC47615 antagonist agent can be used for treating the subject. The appropriate agent can be determined based on screening assays described herein.

[1768] 2. Therapeutic Methods

[1769] Another aspect of the invention pertains to methods of modulating IC47615 expression or activity for therapeutic purposes. Accordingly, in an exemplary embodiment, the modulatory method of the invention involves contacting a cell with an IC47615 or agent that modulates one or more of the activities of IC47615 protein activity associated with the cell. An agent that modulates IC47615 protein activity can be an agent as described herein, such as a nucleic acid or a protein, a naturally-occurring target molecule of an IC47615 protein (e.g., an IC47615 substrate), an IC47615 antibody, an IC47615 agonist or antagonist, a peptidomimetic of an IC47615 agonist or antagonist, or other small molecule. In one embodiment, the agent stimulates one or more IC47615 activities. Examples of such stimulatory agents include active IC47615 protein and a nucleic acid molecule encoding IC47615 that has been introduced into the cell. In another embodiment, the agent inhibits one or more IC47615 activities. Examples of such inhibitory agents include antisense IC47615 nucleic acid molecules, anti-IC47615 antibodies, and IC47615 inhibitors. These modulatory methods can be performed in vitro (e.g., by culturing the cell with the agent) or, alternatively, in vivo (e.g., by administering the agent to a subject). As such, the present invention provides methods of treating an individual afflicted with a disease or disorder characterized by aberrant or unwanted expression or activity of an IC47615 protein or nucleic acid molecule. In one embodiment, the method involves administering an agent (e.g., an agent identified by a screening assay described herein), or combination of agents that modulates (e.g., upregulates or downregulates) IC47615 expression or activity. In another embodiment, the method involves administering an IC47615 protein or nucleic acid molecule as therapy to compensate for reduced, aberrant, or unwanted IC47615 expression or activity.

[1770] Stimulation of IC47615 activity is desirable in situations in which IC47615 is abnormally downregulated and/or in which increased IC47615 activity is likely to have a beneficial effect. Likewise, inhibition of IC47615 activity is desirable in situations in which IC47615 is abnormally upregulated and/or in which decreased IC47615 activity is likely to have a beneficial effect.

[1771] 3. Pharmacogenomics

[1772] The IC47615 molecules of the present invention, as well as agents, or modulators which have a stimulatory or inhibitory effect on IC47615 activity (e.g., IC47615 gene expression) as identified by a screening assay described herein can be administered to individuals to treat (prophylactically or therapeutically) IC47615-associated disorders (e.g., proliferative disorders) associated with aberrant or unwanted IC47615 activity. In conjunction with such treatment, pharmacogenomics (i.e., the study of the relationship between an individual's genotype and that individual's response to a foreign compound or drug) may be considered. Differences in metabolism of therapeutics can lead to severe toxicity or therapeutic failure by altering the relation between dose and blood concentration of the pharmacologically active drug. Thus, a physician or clinician may consider applying knowledge obtained in relevant pharmacogenomics studies in determining whether to administer an IC47615 molecule or IC47615 modulator as well as tailoring the dosage and/or therapeutic regimen of treatment with an IC47615 molecule or IC47615 modulator.

[1773] Pharmacogenomics deals with clinically significant hereditary variations in the response to drugs due to altered drug disposition and abnormal action in affected persons. See, for example, Eichelbaum, M. et al. (1996) Clin. Exp. Pharmacol. Physiol. 23(10-11):983-985 and Linder, M. W. et al. (1997) Clin. Chem. 43(2):254-266. In general, two types of pharmacogenetic conditions can be differentiated. Genetic conditions transmitted as a single factor altering the way drugs act on the body (altered drug action) or genetic conditions transmitted as single factors altering the way the body acts on drugs (altered drug metabolism). These pharmacogenetic conditions can occur either as rare genetic defects or as naturally-occurring polymorphisms. For example, glucose-6-phosphate dehydrogenase deficiency (G6PD) is a common inherited enzymopathy in which the main clinical complication is haemolysis after ingestion of oxidant drugs (anti-malarials, sulfonamides, analgesics, nitrofurans) and consumption of fava beans.

[1774] One pharmacogenomics approach to identifying genes that predict drug response, known as “a genome-wide association”, relies primarily on a high-resolution map of the human genome consisting of already known gene-related markers (e.g., a “bi-allelic” gene marker map which consists of 60,000-100,000 polymorphic or variable sites on the human genome, each of which has two variants.) Such a high-resolution genetic map can be compared to a map of the genome of each of a statistically significant number of patients taking part in a Phase II/III drug trial to identify markers associated with a particular observed drug response or side effect. Alternatively, such a high resolution map can be generated from a combination of some ten-million known single nucleotide polymorphisms (SNPs) in the human genome. As used herein, a “SNP” is a common alteration that occurs in a single nucleotide base in a stretch of DNA. For example, a SNP may occur once per every 1000 bases of DNA. A SNP may be involved in a disease process, however, the vast majority may not be disease-associated. Given a genetic map based on the occurrence of such SNPs, individuals can be grouped into genetic categories depending on a particular pattern of SNPs in their individual genome. In such a manner, treatment regimens can be tailored to groups of genetically similar individuals, taking into account traits that may be common among such genetically similar individuals.

[1775] Alternatively, a method termed the “candidate gene approach”, can be utilized to identify genes that predict drug response. According to this method, if a gene that encodes a drugs target is known (e.g., an IC47615 protein of the present invention), all common variants of that gene can be fairly easily identified in the population and it can be determined if having one version of the gene versus another is associated with a particular drug response.

[1776] As an illustrative embodiment, the activity of drug metabolizing enzymes is a major determinant of both the intensity and duration of drug action. The discovery of genetic polymorphisms of drug metabolizing enzymes (e.g., N-acetyltransferase 2 (NAT 2) and cytochrome P450 enzymes CYP2D6 and CYP2C19) has provided an explanation as to why some patients do not obtain the expected drug effects or show exaggerated drug response and serious toxicity after taking the standard and safe dose of a drug. These polymorphisms are expressed in two phenotypes in the population, the extensive metabolizer (EM) and poor metabolizer (PM). The prevalence of PM is different among different populations. For example, the gene coding for CYP2D6 is highly polymorphic and several mutations have been identified in PM, which all lead to the absence of functional CYP2D6. Poor metabolizers of CYP2D6 and CYP2C19 quite frequently experience exaggerated drug response and side effects when they receive standard doses. If a metabolite is the active therapeutic moiety, PM show no therapeutic response, as demonstrated for the analgesic effect of codeine mediated by its CYP2D6-formed metabolite morphine. The other extreme is the so called ultra-rapid metabolizers who do not respond to standard doses. Recently, the molecular basis of ultra-rapid metabolism has been identified to be due to CYP2D6 gene amplification.

[1777] Alternatively, a method termed the “gene expression profiling”, can be utilized to identify genes that predict drug response. For example, the gene expression of an animal dosed with a drug (e.g., an IC47615 molecule or IC47615 modulator of the present invention) can give an indication whether gene pathways related to toxicity have been turned on.

[1778] Information generated from more than one of the above pharmacogenomics approaches can be used to determine appropriate dosage and treatment regimens for prophylactic or therapeutic treatment an individual. This knowledge, when applied to dosing or drug selection, can avoid adverse reactions or therapeutic failure and thus enhance therapeutic or prophylactic efficiency when treating a subject with an IC47615 molecule or IC47615 modulator, such as a modulator identified by one of the exemplary screening assays described herein.

[1779] E. Electronic Apparatus Readable Media and Arrays

[1780] Electronic apparatus readable media comprising IC47615 sequence information is also provided. As used herein, “IC47615 sequence information” refers to any nucleotide and/or amino acid sequence information particular to the IC47615 molecules of the present invention, including but not limited to full-length nucleotide and/or amino acid sequences, partial nucleotide and/or amino acid sequences, polymorphic sequences including single nucleotide polymorphisms (SNPs), epitope sequences, and the like. Moreover, information “related to” said IC47615 sequence information includes detection of the presence or absence of a sequence (eg., detection of expression of a sequence, fragment, polymorphism, etc.), determination of the level of a sequence (e.g., detection of a level of expression, for example, a quantitative detection), detection of a reactivity to a sequence (e.g., detection of protein expression and/or levels, for example, using a sequence-specific antibody), and the like. As used herein, “electronic apparatus readable media” refers to any suitable medium for storing, holding, or containing data or information that can be read and accessed directly by an electronic apparatus. Such media can include, but are not limited to: magnetic storage media, such as floppy discs, hard disc storage medium, and magnetic tape; optical storage media such as compact discs; electronic storage media such as RAM, ROM, EPROM, EEPROM and the like; and general hard disks and hybrids of these categories such as magnetic/optical storage media. The medium is adapted or configured for having recorded thereon IC47615 sequence information of the present invention.

[1781] As used herein, the term “electronic apparatus” is intended to include any suitable computing or processing apparatus or other device configured or adapted for storing data or information. Examples of electronic apparatus suitable for use with the present invention include stand-alone computing apparatuses; networks, including a local area network (LAN), a wide area network (WAN) Internet, Intranet, and Extranet; electronic appliances such as a personal digital assistants (PDAs), cellular phone, pager and the like; and local and distributed processing systems.

[1782] As used herein, “recorded” refers to a process for storing or encoding information on the electronic apparatus readable medium. Those skilled in the art can readily adopt any of the presently known methods for recording information on known media to generate manufactures comprising the IC47615 sequence information.

[1783] A variety of software programs and formats can be used to store the sequence information on the electronic apparatus readable medium. For example, the sequence information can be represented in a word processing text file, formatted in commercially-available software such as WordPerfect and Microsoft Word, represented in the form of an ASCII file, or stored in a database application, such as DB2, Sybase, Oracle, or the like, as well as in other forms. Any number of dataprocessor structuring formats (e.g., text file or database) may be employed in order to obtain or create a medium having recorded thereon the IC47615 sequence information.

[1784] By providing IC47615 sequence information in readable form, one can routinely access the sequence information for a variety of purposes. For example, one skilled in the art can use the sequence information in readable form to compare a target sequence or target structural motif with the sequence information stored within the data storage means. Search means are used to identify fragments or regions of the sequences of the invention which match a particular target sequence or target motif.

[1785] The present invention therefore provides a medium for holding instructions for performing a method for determining whether a subject has an IC47615 associated disease or disorder or a pre-disposition to an IC47615 associated disease or disorder, wherein the method comprises the steps of determining IC47615 sequence information associated with the subject and based on the IC47615 sequence information, determining whether the subject has an IC47615 associated disease or disorder or a pre-disposition to an IC47615 associated disease or disorder, and/or recommending a particular treatment for the disease, disorder, or pre-disease condition.

[1786] The present invention further provides in an electronic system and/or in a network, a method for determining whether a subject has an IC47615 associated disease or disorder or a pre-disposition to a disease associated with IC47615 wherein the method comprises the steps of determining IC47615 sequence information associated with the subject, and based on the IC47615 sequence information, determining whether the subject has an IC47615 associated disease or disorder or a pre-disposition to an IC47615 associated disease or disorder, and/or recommending a particular treatment for the disease, disorder or pre-disease condition. The method may further comprise the step of receiving phenotypic information associated with the subject and/or acquiring from a network phenotypic information associated with the subject.

[1787] The present invention also provides in a network, a method for determining whether a subject has an IC47615 associated disease or disorder or a pre-disposition to an IC47615 associated disease or disorder associated with IC47615, said method comprising the steps of receiving IC47615 sequence information from the subject and/or information related thereto, receiving phenotypic information associated with the subject, acquiring information from the network corresponding to IC47615 and/or an IC47615 associated disease or disorder, and based on one or more of the phenotypic information, the IC47615 information (e.g., sequence information and/or information related thereto), and the acquired information, determining whether the subject has an IC47615 associated disease or disorder or a pre-disposition to an IC47615 associated disease or disorder. The method may further comprise the step of recommending a particular treatment for the disease, disorder or pre-disease condition.

[1788] The present invention also provides a business method for determining whether a subject has an IC47615 associated disease or disorder or a pre-disposition to an IC47615 associated disease or disorder, said method comprising the steps of receiving information related to IC47615 (e.g., sequence information and/or information related thereto), receiving phenotypic information associated with the subject, acquiring information from the network related to IC47615 and/or related to an IC47615 associated disease or disorder, and based on one or more of the phenotypic information, the IC47615 information, and the acquired information, determining whether the subject has an IC47615 associated disease or disorder or a pre-disposition to an IC47615 associated disease or disorder. The method may further comprise the step of recommending a particular treatment for the disease, disorder or pre-disease condition.

[1789] The invention also includes an array comprising an IC47615 sequence of the present invention. The array can be used to assay expression of one or more genes in the array. In one embodiment, the array can be used to assay gene expression in a tissue to ascertain tissue specificity of genes in the array. In this manner, up to about 7600 genes can be simultaneously assayed for expression, one of which can be IC47615. This allows a profile to be developed showing a battery of genes specifically expressed in one or more tissues.

[1790] In addition to such qualitative determination, the invention allows the quantitation of gene expression. Thus, not only tissue specificity, but also the level of expression of a battery of genes in the tissue is ascertainable. Thus, genes can be grouped on the basis of their tissue expression per se and level of expression in that tissue. This is useful, for example, in ascertaining the relationship of gene expression between or among tissues. Thus, one tissue can be perturbed and the effect on gene expression in a second tissue can be determined. In this context, the effect of one cell type on another cell type in response to a biological stimulus can be determined. Such a determination is useful, for example, to know the effect of cell-cell interaction at the level of gene expression. If an agent is administered therapeutically to treat one cell type but has an undesirable effect on another cell type, the invention provides an assay to determine the molecular basis of the undesirable effect and thus provides the opportunity to co-administer a counteracting agent or otherwise treat the undesired effect. Similarly, even within a single cell type, undesirable biological effects can be determined at the molecular level. Thus, the effects of an agent on expression of other than the target gene can be ascertained and counteracted.

[1791] In another embodiment, the array can be used to monitor the time course of expression of one or more genes in the array. This can occur in various biological contexts, as disclosed herein, for example development of an IC47615 associated disease or disorder, progression of IC47615 associated disease or disorder, and processes, such a cellular transformation associated with the IC47615 associated disease or disorder.

[1792] The array is also useful for ascertaining the effect of the expression of a gene on the expression of other genes in the same cell or in different cells (e.g., ascertaining the effect of IC47615 expression on the expression of other genes). This provides, for example, for a selection of alternate molecular targets for therapeutic intervention if the ultimate or downstream target cannot be regulated.

[1793] The array is also useful for ascertaining differential expression patterns of one or more genes in normal and abnormal cells. This provides a battery of genes (e.g., including IC47615) that could serve as a molecular target for diagnosis or therapeutic intervention.

[1794] This invention is further illustrated by the following examples which should not be construed as limiting. The contents of all references, patents and published patent applications cited throughout this application, as well as the Figures and the Sequence Listing, are incorporated herein by reference.

### EXAMPLES

### Example 1

### Identification and Characterization of Human IC47615 cDNA

[1795] In this example, the identification and characterization of the gene encoding human IC47615 (clone Fbh47615FL) is described.

[1796] Isolation of the IC47615 cDNA

[1797] The invention is based, at least in part, on the discovery of a human gene encoding a novel protein, referred to herein as IC47615. The entire sequence of the human clone Fbh47615FL was determined and found to contain an open reading frame termed human “IC47615.” The nucleotide sequence of the human IC47615 gene is set forth in FIGS. 29A-C and in SEQ ID NOs:34 and 35. The amino acid sequence of the human IC47615 expression product is set forth in FIG. 29 and in SEQ ID NO:35.

[1798] The nucleotide sequence encoding the human IC47615 protein is shown in FIGS. 29A-C and is set forth as SEQ ID NO:34. The protein encoded by this nucleic acid comprises about 305 amino acids and has the amino acid sequence shown in FIGS. 29A-C and set forth as SEQ ID NO:35. The coding region (open reading frame) of SEQ ID NO:34 is set forth as SEQ ID NO:36. Clone Fbh47615FL, comprising the coding region of human IC47615, was deposited with the American Type Culture Collection (ATCC®), 10801 University Boulevard, Manassas, Va. 20110-2209, on ______, and assigned Accession No. ______.

[1799] Analysis of the Human IC47615 Molecules

[1800] The amino acid sequence of human IC47615 was analyzed using the program PSORT (http://www.psort.nibb.ac.jp) to predict the localization of the proteins within the cell. This program assesses the presence of different targeting and localization amino acid sequences within the query sequence. The results of the analysis show that human IC47615 (SEQ ID NO:35) may be localized to the mitochondrion, to the cytoplasm, or to the nucleus.

[1801] A search was performed against the Memsat database (FIG. 31), resulting in the identification of a transmembrane domain in the amino acid sequence of human IC47615 (SEQ ID NO:35) at about residues 274-290.

[1802] Tissue Distribution of IC47615 mRNA

[1803] This example describes the tissue distribution of IC47615 mRNA, as is determined by Polymerase Chain Reaction (PCR) on cDNA libraries using oligonucleotide primers based on the human IC47615 sequence.

[1804] For in situ analysis, various tissues, e.g., tissues obtained from brain, are first frozen on dry ice. Ten-micrometer-thick sections of the tissues are postfixed with 4% formaldehyde in DEPC treated 1×phosphate-buffered saline at room temperature for 10 minutes before being rinsed twice in DEPC 1×phosphate-buffered saline and once in 0.1 M triethanolamine-HCl (pH 8.0). Following incubation in 0.25% acetic anhydride-0.1 M triethanolamine-HCl for 10 minutes, sections are rinsed in DEPC 2×SSC (1×SSC is 0.15M NaCl plus 0.015M sodium citrate). Tissue is then dehydrated through a series of ethanol washes, incubated in 100% chloroform for 5 minutes, and then rinsed in 100% ethanol for 1 minute and 95% ethanol for 1 minute and allowed to air dry.

[1805] Hybridizations are performed with ³⁵S-radiolabeled (5×10⁷ cpm/ml) cRNA probes. Probes are incubated in the presence of a solution containing 600 mM NaCl, 10 mM Tris (pH 7.5), 1 mM EDTA, 0.01% sheared salmon sperm DNA, 0.01% yeast tRNA, 0.05% yeast total RNA type X1, 1×Denhardt's solution, 50% formamide, 10% dextran sulfate, 100 mM dithiothreitol, 0.1% sodium dodecyl sulfate (SDS), and 0.1% sodium thiosulfate for 18 hours at 55° C.

[1806] After hybridization, slides are washed with 2×SSC. Sections are then sequentially incubated at 37° C. in TNE (a solution containing 10 mM Tris-HCl (pH 7.6), 500 mM NaCl, and 1 mM EDTA), for 10 minutes, in TNE with 10 μg of RNase A per ml for 30 minutes, and finally in TNE for 10 minutes. Slides are then rinsed with 2×SSC at room temperature, washed with 2×SSC at 50° C. for 1 hour, washed with 0.2×SSC at 55° C. for 1 hour, and 0.2×SSC at 60° C. for 1 hour. Sections are then dehydrated rapidly through serial ethanol-0.3 M sodium acetate concentrations before being air dried and exposed to Kodak Biomax MR scientific imaging film for 24 hours and subsequently dipped in NB-2 photoemulsion and exposed at 4° C. for 7 days before being developed and counter stained.

### Example 2

### Expression of Recombinant IC47615 Protein in Bacterial Cells

[1807] In this example, IC47615 is expressed as a recombinant glutathione-S-transferase (GST) fusion polypeptide in E. coli and the fusion polypeptide is isolated and characterized. Specifically, IC47615 is fused to GST and this fusion polypeptide is expressed in E. coli, e.g., strain PEB199. Expression of the GST-IC47615 fusion protein in PEB199 is induced with IPTG. The recombinant fusion polypeptide is purified from crude bacterial lysates of the induced PEB199 strain by affinity chromatography on glutathione beads. Using polyacrylamide gel electrophoretic analysis of the polypeptide purified from the bacterial lysates, the molecular weight of the resultant fusion polypeptide is determined.

### Example 3

### Expression of Recombinant IC47615 Protein in COS Cells

[1808] To express the IC47615 gene in COS cells, the pcDNA/Amp vector by Invitrogen Corporation (San Diego, Calif.) is used. This vector contains an SV40 origin of replication, an ampicillin resistance gene, an E. coli replication origin, a CMV promoter followed by a polylinker region, and an SV40 intron and polyadenylation site. A DNA fragment encoding the entire IC47615 protein and an HA tag (Wilson et al. (1984) Cell 37:767) or a FLAG tag fused in-frame to its 3′ end of the fragment is cloned into the polylinker region of the vector, thereby placing the expression of the recombinant protein under the control of the CMV promoter.

[1809] To construct the plasmid, the IC47615 DNA sequence is amplified by PCR using two primers. The 5′ primer contains the restriction site of interest followed by approximately twenty nucleotides of the IC47615 coding sequence starting from the initiation codon; the 3′ end sequence contains complementary sequences to the other restriction site of interest, a translation stop codon, the HA tag or FLAG tag and the last 20 nucleotides of the IC47615 coding sequence. The PCR amplified fragment and the pCDNA/Amp vector are digested with the appropriate restriction enzymes and the vector is dephosphorylated using the CIAP enzyme (New England Biolabs, Beverly, Mass.). Preferably the two restriction sites chosen are different so that the IC47615 gene is inserted in the correct orientation. The ligation mixture is transformed into E. coli cells (strains HB101, DH5α, SURE, available from Stratagene Cloning Systems, La Jolla, Calif., can be used), the transformed culture is plated on ampicillin media plates, and resistant colonies are selected. Plasmid DNA is isolated from transformants and examined by restriction analysis for the presence of the correct fragment.

[1810] COS cells are subsequently transfected with the IC47615-pcDNA/Amp plasmid DNA using the calcium phosphate or calcium chloride co-precipitation methods, DEAE-dextran-mediated transfection, lipofection, or electroporation. Other suitable methods for transfecting host cells can be found in Sambrook, J. et al., Molecular Cloning: A Laboratory Manual. 2nd, ed., Cold Spring Harbor Laboratory, Cold Spring Harbor Laboratory Press, Cold Spring Harbor, N.Y., 1989. The expression of the IC47615 polypeptide is detected by radiolabeling (³⁵S-methionine or ³⁵S-cysteine available from NEN, Boston, Mass., can be used) and immunoprecipitation (Harlow, E. and Lane, D. Antibodies: A Laboratory Manual, Cold Spring Harbor Laboratory Press, Cold Spring Harbor, N.Y., 1988) using an HA specific monoclonal antibody. Briefly, the cells are labeled for 8 hours with ³⁵S-methionine (or ³⁵S-cysteine). The culture media are then collected and the cells are lysed using detergents (RIPA buffer, 150 mM NaCl, 1% NP-40, 0.1% SDS, 0.5% DOC, 50 mM Tris, pH 7.5). Both the cell lysate and the culture media are precipitated with an HA specific monoclonal antibody. Precipitated polypeptides are then analyzed by SDS-PAGE.

[1811] Alternatively, DNA containing the IC47615 coding sequence is cloned directly into the polylinker of the pCDNA/Amp vector using the appropriate restriction sites. The resulting plasmid is transfected into COS cells in the manner described above, and the expression of the IC47615 polypeptide is detected by radiolabeling and immunoprecipitation using an IC47615 specific monoclonal antibody.

### VII. 55063, A NOVEL HUMAN NMDA FAMILY MEMBER AND USES THEREOF

### Background of the Invention

[1812] Ion channels constitute a large family of membrane-bound proteins responsible for a wide range of important transport and signaling functions in cells. Members of this family regulate ion selectivity in response to a specific stimulus such as a change in voltage across a biological membrane (voltage-gated channels), a mechanical stress (mechanically gated channels, or the binding of a ligand (ligand-gated channels). lonotropic neurotransmitter receptors (or transmitter-gated ion channels) are members of the ligand-gated ion channel family and include receptors with specificity for acetylcholine, serotonin, glycine, glutamate, and GABA (γ-aminobutyric acid). Transmitter-gated ion channels rapidly convert extracellular chemical signals into electrical signals at chemical synapses. The channels open transiently in response to neurotransmitter binding, producing a transient permeability change in the membrane, and resulting in a change in the membrane potential.

[1813] Glutamate-gated ion channels are members of the transmitter-gated ion channel family. These receptors exist as multimeric proteins (typically pentamers) which may consist of various combinations of monomeric subunits, thus, generating a large array of receptors with varying channel subtypes, ligand affinities, channel conductances, opening and closing rates, and different sensitivities to drugs and toxins (Bigge (1999) Curr. Op. Chem. Biol. 3:441-447). The glutamate-gated ion channel family includes three classes of receptors: kainate receptors, AMPA (α-amino-3-hydroxy-5-methyl-4-isoxazolepropionic acid) receptors, and NMDA (N-methyl-D-aspartic acid) receptors. The NMDA receptors control intracellular Ca²⁺ concentration in response to the binding of the agonist L-glutamate and the co-agonist glycine, and initiates long-term potentiation at synapses (Yamakura et al. (1999) Prog. Neurobiol. 59:279-298).

[1814] NMDA receptors are glycosylated proteins that contain four transmembrane regions, a large amino-terminal cytoplasmic domain, and a small carboxy-terminal intracellular domain which contains phosphorylation sites responsible for modifying receptor activity (Bigge (1999) Curr. Op. Chem. Biol. 3:441-447). In situ hybridization in the mouse has shown a ubiquitous distribution of NMDA receptors in the brain, while NMDA mRNA is observed in characteristic distributions in the brain and spinal cord, and is differentially expressed during development in the brain (Yamakura et al. (1999) Prog. Neurobiol. 59:279-298). These receptors are molecularly diverse, with multiple subunits displaying distinct distributions, properties and regulation, depending upon the region of the brain in which they are expressed, as well as the developmental stage at which they are expressed. They play a role in synaptic plasticity and synapse formation underlying memory, learning, and formation of neural networks during development. Pathological states involving NMDA receptors include acute and chronic neurological disorders; psychiatric disorders; and neuropathic pain syndromes.

### Summary of the Invention

[1815] The present invention is based, at least in part, on the discovery of novel human N-methyl-D-aspartate (NMDA) family members, referred to herein as “human NMDA-1” or “HNMDA-1” nucleic acid and polypeptide molecules. The HNMDA-1 nucleic acid and polypeptide molecules of the present invention are useful as modulating agents in regulating a variety of cellular processes, e.g., synaptic plasticity and synapse formation. Accordingly, in one aspect, this invention provides isolated nucleic acid molecules encoding HNMDA-1 polypeptides or biologically active portions thereof, as well as nucleic acid fragments suitable as primers or hybridization probes for the detection of HNMDA-1-encoding nucleic acids.

[1816] In one embodiment, the invention features an isolated nucleic acid molecule that includes the nucleotide sequence set forth in SEQ ID NO:37 or 39. In another embodiment, the invention features an isolated nucleic acid molecule that encodes a polypeptide including the amino acid sequence set forth in SEQ ID NO:38. In another embodiment, the invention features an isolated nucleic acid molecule that includes the nucleotide sequence contained in the plasmid deposited with ATCC® as Accession Number ______.

[1817] In still other embodiments, the invention features isolated nucleic acid molecules including nucleotide sequences that are substantially identical (e.g., 71.2%, 72%, 75%, 80%, 85%, 90%, 95%, 96%, 97%, 98% or 99% identical) to the nucleotide sequence set forth as SEQ ID NO:37 or 39. The invention further features isolated nucleic acid molecules including at least 591 contiguous nucleotides of the nucleotide sequence set forth as SEQ ID NO:37 or 39. In another embodiment, the invention features isolated nucleic acid molecules which encode a polypeptide including an amino acid sequence that is substantially identical (e.g., 94.2%, 95%, 96%, 97%, 98%, or 99% identical) to the amino acid sequence set forth as SEQ ID NO:38. The present invention also features nucleic acid molecules which encode allelic variants of the polypeptide having the amino acid sequence set forth as SEQ ID NO:38. In addition to isolated nucleic acid molecules encoding full-length polypeptides, the present invention also features nucleic acid molecules which encode fragments, for example, biologically active or antigenic fragments, of the full-length polypeptides of the present invention (e.g., fragments including at least 97 contiguous amino acid residues of the amino acid sequence of SEQ ID NO:38). In still other embodiments, the invention features nucleic acid molecules that are complementary to, antisense to, or hybridize under stringent conditions to the isolated nucleic acid molecules described herein.

[1818] In another aspect, the invention provides vectors including the isolated nucleic acid molecules described herein (e.g., HNMDA-1-encoding nucleic acid molecules). Such vectors can optionally include nucleotide sequences encoding heterologous polypeptides. Also featured are host cells including such vectors (e.g., host cells including vectors suitable for producing HNMDA-1 nucleic acid molecules and polypeptides).

[1819] In another aspect, the invention features isolated HNMDA-1 polypeptides and/or biologically active or antigenic fragments thereof. Exemplary embodiments feature a polypeptide including the amino acid sequence set forth as SEQ ID NO:38, a polypeptide including an amino acid sequence at least 94.2%, 95%, 96%, 97%, 98%, or 99% identical to the amino acid sequence set forth as SEQ ID NO:38, a polypeptide encoded by a nucleic acid molecule including a nucleotide sequence at least 71.2%, 72%, 75%, 80%, 85%, 90%, 95%, 96%, 97%, 98% or 99% identical to the nucleotide sequence set forth as SEQ ID NO:37 or 39. Also featured are fragments of the full-length polypeptides described herein (e.g., fragments including at least 97 contiguous amino acid residues of the sequence set forth as SEQ ID NO:38) as well as allelic variants of the polypeptide having the amino acid sequence set forth as SEQ ID NO:38.

[1820] The HNMDA-1 polypeptides and/or biologically active or antigenic fragments thereof, are useful, for example, as reagents or targets in assays applicable to treatment and/or diagnosis of HNMDA-1 mediated or related disorders. In one embodiment, an HNMDA-1 polypeptide or fragment thereof, has an HNMDA-1 activity. In another embodiment, an HNMDA-1 polypeptide or fragment thereof, includes a transmembrane domain, a signal sequence, an ionotropic glutamate receptor family domain, and/or a ligand-gated ion channel family domain, and optionally, has an HNMDA-1 activity. In a related aspect, the invention features antibodies (e.g., antibodies which specifically bind to any one of the polypeptides described herein) as well as fusion polypeptides including all or a fragment of a polypeptide described herein.

[1821] The present invention further features methods for detecting HNMDA-1 polypeptides and/or HNMDA-1 nucleic acid molecules, such methods featuring, for example, a probe, primer or antibody described herein. Also featured are kits e.g., kits for the detection of HNMDA-1 polypeptides and/or HNMDA-1 nucleic acid molecules. In a related aspect, the invention features methods for identifying compounds which bind to and/or modulate the activity of an HNMDA-1 polypeptide or HNMDA-1 nucleic acid molecule described herein. Further featured are methods for modulating an HNMDA-1 activity.

[1822] Other features and advantages of the invention will be apparent from the following detailed description and claims.

### Detailed Description of the Invention

[1823] The present invention is based, at least in part, on the discovery of novel molecules, referred to herein as “human NMDA-1” or “HNMDA-1” nucleic acid and polypeptide molecules, which are novel members of the glutamate-gated ion channel family. These novel molecules are capable of, for example, modulating a glutamate-gated ion channel mediated activity (e.g., an NMDA mediated activity) in a neural cell (e.g., in the brain and/or spinal cord). These novel molecules are capable of binding neurotransmitters, e.g., L-glutamate and glycine, and transporting ions, e.g., Ca²⁺, across neural membranes and, thus, play a role in or function in a variety of cellular processes, e.g., mediating excitatory postsynaptic currents (e.g., long term potentiation).

[1824] As used herein, a “glutamate-gated ion channel” includes a protein or polypeptide which is a member of the ligand-gated ion channel family and is involved in binding ligands, (e.g., binding L-glutamate and glycine), and transporting ions (e.g., Ca²⁺) across the plasma membrane of a cell (e.g., a neural cell). Glutamate-gated ion channels regulate long term potentiation in a cell and, typically, have glutamate substrate specificity. Examples of glutamate-gated ion channels include kainate, AMPA, and NMDA receptors.

[1825] As used herein, a “glutamate-gated ion channel mediated activity” includes an activity which involves a glutamate-gated ion channel in a cell (e.g., in a neural cell). Glutamate-gated ion channel mediated activities include the binding of a ligand (e.g., L-glutamine and/or glycine); the transporting of Ca²⁺ across a neural membrane; the regulation of long term potentiation; and the regulation of synapse formation underlying memory, learning, and formation of neural networks during development.

[1826] As the HNMDA-1 molecules of the present invention are glutamate-gated ion channels, they may be useful for developing novel diagnostic and therapeutic agents for glutamate-gated ion channel associated disorders. As used herein, the term “glutamate-gated ion channel associated disorder” includes a disorder, disease, or condition which is characterized by an aberrant, e.g., upregulated or downregulated, glutamate-gated ion channel mediated activity. Glutamate-gated ion channel associated disorders typically result in, e.g., upregulated or downregulated, Ca²⁺ levels in a cell (e.g., a neural cell). Examples of glutamate-gated ion channel associated disorders include disorders associated with long term synapse potentiation, acute and chronic neurological disorders, psychiatric disorders, and neuropathic pain syndromes. Glutamate-gated ion channel associated disorders can detrimentally affect conveyance of sensory impulses from the periphery to the brain and/or conductance of motor impulses from the brain to the periphery; integration of reflexes; interpretation of sensory impulses; and emotional, intellectual (e.g., learning and memory), or motor processes.

[1827] The term “family” when referring to the polypeptide and nucleic acid molecules of the invention is intended to mean two or more polypeptides or nucleic acid molecules having a common structural domain or motif and having sufficient amino acid or nucleotide sequence homology as defined herein. Such family members can be naturally or non-naturally occurring and can be from either the same or different species. For example, a family can contain a first polypeptide of human origin, as well as other, distinct polypeptides of human origin or alternatively, can contain homologues of non-human origin, e.g., mouse or monkey polypeptides. Members of a family may also have common functional characteristics.

[1828] For example, the family of HNMDA-1 polypeptides comprise at least one “transmembrane domain” and preferably four transmembrane domains. As used herein, the term “transmembrane domain” includes an amino acid sequence of about 20-45 amino acid residues in length which spans the plasma membrane. More preferably, a transmembrane domain includes about at least 20, 25, 30, 35, 40, or 45 amino acid residues and spans the plasma membrane. Transmembrane domains are rich in hydrophobic residues, and typically have an alpha-helical structure. In a preferred embodiment, at least 50%, 60%, 70%, 80%, 90%, 95% or more of the amino acids of a transmembrane domain are hydrophobic, e.g., leucines, isoleucines, alanines, valines, phenylalanines, prolines or methionines. Transmembrane domains are described in, for example, Zagotta W. N. et al, (1996) Annual Rev. Neurosci. 19: 235-263, the contents of which are incorporated herein by reference. A MEMSAT analysis resulted in the identification of four transmembrane domains in the amino acid sequence of HNMDA-1 (SEQ ID NO:38) at about residues 7-28, 677-695, 748-770, and 931-951 as set forth in FIG. 32.

[1829] Accordingly, HNMDA-1 polypeptides having at least 50-60% homology, preferably about 60-70%, more preferably about 70-80%, or about 80-90% homology with a transmembrane domain of human HNMDA-1 are within the scope of the invention.

[1830] In another embodiment of the invention features HNMDA-1 molecules which contain a signal sequence. As used herein, a “signal peptide” includes a peptide of at least about 20 amino acid residues in length which occurs at the N-terminus of secretory and integral membrane proteins and which contains at least 55% hydrophobic amino acid residues. In a preferred embodiment, a signal sequence contains at least about 15-45 amino acid residues, preferably about 20-42 amino acid residues. Signal sequences of 25-35 amino acid residues and 28-32 amino acid residues are also within the scope of the invention. As used herein, a signal sequence has at least about 40-70%, preferably about 50-65%, and more preferably about 55-60% hydrophobic amino acid residues (e.g., Alanine, Valine, Leucine, Isoleucine, Phenylalanine, Tyrosine, Tryptophan, or Proline). Such a “signal peptide”, also referred to in the art as a “signal sequence”, serves to direct a protein containing such a sequence to a lipid bilayer. For example, a signal sequence can be found at about amino acids 1-22 of SEQ ID NO:38 (Met1 to Ala22 of the HNMDA-1 amino acid sequence).

[1831] Accordingly, HNMDA-1 polypeptides having at least 50-60% homology, preferably about 60-70%, more preferably about 70-80%, or about 80-90% homology with a signal sequence domain of HNMDA-1 are within the scope of the invention.

[1832] In another embodiment, an HNMDA-1 molecule of the present invention is identified based on the presence of at least one “ligand-gated ion channel family domain.” As used herein, the term “ligand-gated ion channel family domain” includes a protein domain having at least about 200-400 amino acid residues, having a bit score of at least 100 when compared against a ligand-gated ion channel family domain Hidden Markov Model (HMM), and, preferably, a ligand-gated ion channel mediated activity. Preferably, a ligand-gated ion channel family domain includes a polypeptide having an amino acid sequence of about 250-400, 250-350, or more preferably, about 278 amino acid residues, a bit score of at least 160, 170, 180, 190, or more preferably about 198.1, and, preferably a ligand-gated ion channel mediated activity. To identify the presence of a ligand-gated ion channel family domain in an HNMDA-1 protein, and make the determination that a protein of interest has a particular profile, the amino acid sequence of the protein may be searched against a database of known protein domains (e.g., the PFAM HMM database). A PFAM ligand-gated ion channel family domain has been assigned the PFAM Accession PF00060. A search was performed against the PFAM HMM database resulting in the identification of a ligand-gated ion channel family domain in the amino acid sequence of an HNMDA-1 (SEQ ID NO:38) at about residues 674-952 of SEQ ID NO:38. The results of the search are set forth in FIG. 34.

[1833] Preferably a “ligand-gated ion channel family domain” has a “ligand-gated ion channel mediated activity” as described herein. For example, a ligand-gated ion channel family domain may have the ability to bind a ligand, e.g., a neurotransmitter (e.g., acetylcholine, serotonin, glycine, glutamate, and/or GABA), on a cell (e.g., a neural cell); and the ability to regulate ion transport in a cell (e.g., Ca²⁺, K⁺, H⁺, Cl⁻, Mg²⁺ and/or Na⁺). Accordingly, identifying the presence of a “ligand-gated ion channel family domain” can include isolating a fragment of an HNMDA-1 molecule (e.g., an HNMDA-1 polypeptide) and assaying for the ability of the fragment to exhibit one of the aforementioned ligand-gated ion channel mediated activities.

[1834] In another embodiment, an HNMDA-1 molecule of the present invention is identified based on the presence of at least one “glutamate-gated ion channel family domain.” As used herein, the term “glutamate-gated ion channel family domain,” also known as an “ionotropic glutamate receptor family domain,” includes a protein domain having at least about 200-500 amino acid residues, having a bit score of at least 200 when compared against a glutamate-gated ion channel family domain Hidden Markov Model (HMM), and a glutamate-gated ion channel mediated activity. Preferably, a glutamate-gated ion channel family domain includes a polypeptide having an amino acid sequence of about 250-450, 300-400, 325-375, or more preferably, about 345 amino acid residues, a bit score of at least 210, 220, 230, 240, 250, 260, or more preferably about 267.4, and a glutamate-gated ion channel mediated activity. To identify the presence of a glutamate-gated ion channel family domain in an HNMDA-1 protein, and make the determination that a protein of interest has a particular profile, the amino acid sequence of the protein may be searched against a database of known protein domains (e.g., the PFAM HMM database). A PFAM glutamate-gated ion channel family domain has been assigned the InterPro Accession IPR001320. A search was performed against the PFAM HMM database resulting in the identification of a glutamate-gated ion channel family domain in the amino acid sequence of an HNMDA-1 (SEQ ID NO:38) at about residues 565-910 of SEQ ID NO:38. The results of the search are set forth in FIGS. 35A-B.

[1835] Preferably a “glutamate-gated ion channel family domain” has a “glutamate-gated ion channel mediated activity” as described herein. For example, a glutamate-gated ion channel family domain may have the ability to bind a ligand, e.g., L-glutamate and/or glycine, on a cell (e.g., a neural cell); and the ability to regulate Ca²⁺ transport in a cell. Accordingly, identifying the presence of a “glutamate-gated ion channel family domain” can include isolating a fragment of an HNMDA-1 molecule (e.g., an HNMDA-1 polypeptide) and assaying for the ability of the fragment to exhibit one of the aforementioned glutamate-gated ion channel mediated activities.

[1836] A description of the Pfam database can be found in Sonhammer et al. (1997) Proteins 28:405-420 and a detailed description of HMMs can be found, for example, in Gribskov et al.(1990) Meth. Enzymol. 183:146-159; Gribskov et al.(1987) Proc. Natl. Acad, Sci. USA 84:4355-4358; Krogh et al.(1994) J. Mol. Biol. 235:1501-1531; and Stultz et al.(1993) Protein Sci. 2:305-314, the contents of which are incorporated herein by reference.

[1837] In a preferred embodiment, the HNMDA-1 molecules of the invention include at least one, preferably two, more preferably three, and even more preferably four transmembrane domain(s) and at least one of the following domains: a signal peptide, a ligand-gated ion channel family domain, and/or a glutamate-gated ion channel family domain.

[1838] Isolated HNMDA-1 polypeptides of the present invention have an amino acid sequence sufficiently identical to the amino acid sequence of SEQ ID NO:38 or are encoded by a nucleotide sequence sufficiently identical to SEQ ID NO:37 or 39. As used herein, the term “sufficiently identical” refers to a first amino acid or nucleotide sequence which contains a sufficient or minimum number of identical or equivalent (e.g., an amino acid residue which has a similar side chain) amino acid residues or nucleotides to a second amino acid or nucleotide sequence such that the first and second amino acid or nucleotide sequences share common structural domains or motifs and/or a common functional activity. For example, amino acid or nucleotide sequences which share common structural domains having at least 50%, 55%, 60%, 65%, 70%, 75%, 80%, 85%, 85%, 90%, 95%, 96%, 97%, 98%, 99% or more homology or identity across the amino acid sequences of the domains and contain at least one and preferably two structural domains or motifs, are defined herein as sufficiently identical. Furthermore, amino acid or nucleotide sequences which share at least 50%, 55%, 60%, 65%, 70%, 75%, 80%, 85%, 85%, 90%, 95%, 96%, 97%, 98%, 99% or more homology or identity and share a common functional activity are defined herein as sufficiently identical.

[1839] In a preferred embodiment, an HNMDA-1 polypeptide includes at least one or more of the following domains: a transmembrane domain, a signal peptide, a ligand-gated ion channel family domain, and/or a glutamate-gated ion channel family domain, and has an amino acid sequence at least about 50%, 55%, 60%, 65%, 70%, 75%, 80%, 85%, 85%, 90%, 95%, 96%, 97%, 98%, 99% or more homologous or identical to the amino acid sequence of SEQ ID NO:38, or the amino acid sequence encoded by the DNA insert of the plasmid deposited with ATCC as Accession Number ______. In yet another preferred embodiment, an HNMDA-1 polypeptide includes at least one or more of the following domains: a transmembrane domain, a signal peptide, a ligand-gated ion channel family domain, and/or a glutamate-gated ion channel family domain, and is encoded by a nucleic acid molecule having a nucleotide sequence which hybridizes under stringent hybridization conditions to a complement of a nucleic acid molecule comprising the nucleotide sequence of SEQ ID NO:37 or 39. In another preferred embodiment, an HNMDA-1 polypeptide includes at least one or more of the following domains: a transmembrane domain, a signal peptide, a ligand-gated ion channel family domain, and/or a glutamate-gated ion channel family domain, and has an HNMDA-1 activity.

[1840] As used interchangeably herein, an “HNMDA-1 activity”, “biological activity of HNMDA-1” or “functional activity of HNMDA-1,” refers to an activity exerted by an HNMDA-1 polypeptide or nucleic acid molecule on an HNMDA-1 responsive cell or tissue, or on an HNMDA-1 polypeptide substrate, as determined in vivo, or in vitro, according to standard techniques. In one embodiment, an HNMDA-1 activity is a direct activity, such as an association with an HNMDA-1-target molecule. As used herein, a “substrate,” “target molecule,” or “binding partner” is a molecule with which an HNMDA-1 polypeptide binds or interacts in nature, such that HNMDA-1-mediated function is achieved. An HNMDA-1 target molecule can be a non-HNMDA-1 molecule or an HNMDA-1 polypeptide or polypeptide of the present invention. In an exemplary embodiment, an HNMDA-1 target molecule is an HNMDA-1 ligand, e.g., a glutamate-gated ion channel ligand such as L-glutamate or glycine. Alternatively, an HNMDA-1 activity is an indirect activity, such as a cellular signaling activity mediated by interaction of the HNMDA-1 polypeptide with an HNMDA-1 ligand. The biological activities of HNMDA-1 are described herein. For example, the HNMDA-1 polypeptides of the present invention can have one or more of the following activities: (1) modulate Ca²⁺ transport across a cell membrane, (2) modulate intracellular Ca²⁺ concentration, (3) bind a ligand, e.g., L-glutamate, and/or glycine, (4) influence long term synapse potentiation, (5) modulate synapse formation, e.g., synapse formation related to memory or learning, and/or (6) modulate synapse formation related to the formation of neural networks during development.

[1841] The nucleotide sequence of the isolated HNMDA-1 cDNA and the predicted amino acid sequence of the HNMDA-1 polypeptide are shown in FIG. 32 and in SEQ ID NOs:37 and 38, respectively. A plasmid containing the nucleotide sequence encoding HNMDA-1 was deposited with the American Type Culture Collection (ATCC), 10801 University Boulevard, Manassas, Va. 20110-2209, on ______ and assigned Accession Number ______. This deposit will be maintained under the terms of the Budapest Treaty on the International Recognition of the Deposit of Microorganisms for the Purposes of Patent Procedure. This deposit was made merely as a convenience for those of skill in the art and is not an admission that a deposit is required under 35 U.S.C. §112.

[1842] The HNMDA-1 gene, which is approximately 4197 nucleotides in length, encodes a polypeptide which is approximately 1115 amino acid residues in length.

[1843] Various aspects of the invention are described in further detail in the following subsections:

[1844] I. Isolated Nucleic Acid Molecules

[1845] One aspect of the invention pertains to isolated nucleic acid molecules that encode HNMDA-1 polypeptides or biologically active portions thereof, as well as nucleic acid fragments sufficient for use as hybridization probes to identify HNMDA-1-encoding nucleic acid molecules (e.g., HNMDA-1 mRNA) and fragments for use as PCR primers for the amplification or mutation of HNMDA-1 nucleic acid molecules. As used herein, the term “nucleic acid molecule” is intended to include DNA molecules (e.g., cDNA or genomic DNA) and RNA molecules (e.g., mRNA) and analogs of the DNA or RNA generated using nucleotide analogs. The nucleic acid molecule can be single-stranded or double-stranded, but preferably is double-stranded DNA.

[1846] The term “isolated nucleic acid molecule” includes nucleic acid molecules which are separated from other nucleic acid molecules which are present in the natural source of the nucleic acid. For example, with regards to genomic DNA, the term “isolated” includes nucleic acid molecules which are separated from the chromosome with which the genomic DNA is naturally associated. Preferably, an “isolated” nucleic acid is free of sequences which naturally flank the nucleic acid (i.e., sequences located at the 5′ and 3′ ends of the nucleic acid) in the genomic DNA of the organism from which the nucleic acid is derived. For example, in various embodiments, the isolated HNMDA-1 nucleic acid molecule can contain less than about 5 kb, 4 kb, 3 kb, 2 kb, 1 kb, 0.5 kb or 0.1 kb of nucleotide sequences which naturally flank the nucleic acid molecule in genomic DNA of the cell from which the nucleic acid is derived. Moreover, an “isolated” nucleic acid molecule, such as a cDNA molecule, can be substantially free of other cellular material, or culture medium when produced by recombinant techniques, or substantially free of chemical precursors or other chemicals when chemically synthesized.

[1847] A nucleic acid molecule of the present invention, e.g., a nucleic acid molecule having the nucleotide sequence of SEQ ID NO:37 or 39, or the nucleotide sequence of the DNA insert of the plasmid deposited with ATCC as Accession Number ______, or a portion thereof, can be isolated using standard molecular biology techniques and the sequence information provided herein. Using all or a portion of the nucleic acid sequence of SEQ ID NO:37 or 39, or the nucleotide sequence of the DNA insert of the plasmid deposited with ATCC as Accession Number ______, as a hybridization probe, HNMDA-1 nucleic acid molecules can be isolated using standard hybridization and cloning techniques (e.g., as described in Sambrook, J., Fritsh, E. F., and Maniatis, T. Molecular Cloning: A Laboratory Manual. 2nd, ed., Cold Spring Harbor Laboratory, Cold Spring Harbor Laboratory Press, Cold Spring Harbor, N.Y., 1989).

[1848] Moreover, a nucleic acid molecule encompassing all or a portion of SEQ ID NO:37 or 39, or the nucleotide sequence of the DNA insert of the plasmid deposited with ATCC as Accession Number ______ can be isolated by the polymerase chain reaction (PCR) using synthetic oligonucleotide primers designed based upon the sequence of SEQ ID NO:37 or 39, or the nucleotide sequence of the DNA insert of the plasmid deposited with ATCC as Accession Number ______.

[1849] A nucleic acid of the invention can be amplified using cDNA, mRNA or alternatively, genomic DNA, as a template and appropriate oligonucleotide primers according to standard PCR amplification techniques. The nucleic acid so amplified can be cloned into an appropriate vector and characterized by DNA sequence analysis. Furthermore, oligonucleotides corresponding to HNMDA-1 nucleotide sequences can be prepared by standard synthetic techniques, e.g., using an automated DNA synthesizer.

[1850] In one embodiment, an isolated nucleic acid molecule of the invention comprises the nucleotide sequence shown in SEQ ID NO:37. The sequence of SEQ ID NO:37 corresponds to the HNMDA-1 cDNA. This cDNA comprises sequences encoding the HNMDA-1 polypeptide (i.e., “the coding region”, from nucleotides 1-3348) as well as 3′ untranslated sequences (nucleotides 3349-4197). Alternatively, the nucleic acid molecule can comprise only the coding region of SEQ ID NO:37 (e.g., nucleotides 1-3348, corresponding to SEQ ID NO:39). Accordingly, in another embodiment, the isolated nucleic acid molecule comprises SEQ ID NO:39 and nucleotides 3349-4197 of SEQ ID NO:37. In yet another embodiment, the nucleic acid molecule consists of the nucleotide sequence set forth as SEQ ID NO:37 or 39.

[1851] In still another embodiment, an isolated nucleic acid molecule of the invention comprises a nucleic acid molecule which is a complement of the nucleotide sequence shown in SEQ ID NO:37 or 39, or the nucleotide sequence of the DNA insert of the plasmid deposited with ATCC as Accession Number ______, or a portion of any of these nucleotide sequences. A nucleic acid molecule which is complementary to the nucleotide sequence shown in SEQ ID NO:37 or 39, or the nucleotide sequence of the DNA insert of the plasmid deposited with ATCC as Accession Number ______, is one which is sufficiently complementary to the nucleotide sequence shown in SEQ ID NO:37 or 39, or the nucleotide sequence of the DNA insert of the plasmid deposited with ATCC as Accession Number ______, such that it can hybridize to the nucleotide sequence shown in SEQ ID NO:37 or 39, or the nucleotide sequence of the DNA insert of the plasmid deposited with ATCC as Accession Number ______, thereby forming a stable duplex.

[1852] In still another preferred embodiment, an isolated nucleic acid molecule of the present invention comprises a nucleotide sequence which is at least about 50%, 55%, 60%, 65%, 70%, 75%, 80%, 85%, 90%, 95%, 96%, 97%, 98%, 99% or more identical to the nucleotide sequence shown in SEQ ID NO:37 or 39 (e.g., to the entire length of the nucleotide sequence), or to the nucleotide sequence (e.g., the entire length of the nucleotide sequence) of the DNA insert of the plasmid deposited with ATCC as Accession Number ______, or a portion of any of these nucleotide sequences. In one embodiment, a nucleic acid molecule of the present invention comprises a nucleotide sequence which is at least (or no greater than) 50-100, 100-250, 250-500, 500-750, 750-1000, 1000-1250, 1250-1500, 1500-1750, 1750-1900, 1900-2150, 2150-2400, 2400-2650, 2650-2900, 2900-3150, 3150-3400, 3400-3650, 3650-3900, 3900-4150 or more nucleotides in length and hybridizes under stringent hybridization conditions to a complement of a nucleic acid molecule of SEQ ID NO:37 or 39, or the nucleotide sequence of the DNA insert of the plasmid deposited with ATCC as Accession Number ______.

[1853] Moreover, the nucleic acid molecule of the invention can comprise only a portion of the nucleic acid sequence of SEQ ID NO:37 or 39, or the nucleotide sequence of the DNA insert of the plasmid deposited with ATCC as Accession Number ______, for example, a fragment which can be used as a probe or primer or a fragment encoding a portion of an HNMDA-1 polypeptide, e.g., a biologically active portion of an HNMDA-1 polypeptide. The nucleotide sequence determined from the cloning of the HNMDA-1 gene allows for the generation of probes and primers designed for use in identifying and/or cloning other HNMDA-1 family members, as well as HNMDA-1 homologues from other species. The probe/primer typically comprises substantially purified oligonucleotide. The probe/primer (e.g., oligonucleotide) typically comprises a region of nucleotide sequence that hybridizes under stringent conditions to at least about 12 or 15, preferably about 20 or 25, more preferably about 30, 35, 40, 45, 50, 55, 60, 65, 75, 80, 85, 90, 95, or 100 or more consecutive nucleotides of a sense sequence of SEQ ID NO:37 or 39, or the nucleotide sequence of the DNA insert of the plasmid deposited with ATCC as Accession Number ______, of an anti-sense sequence of SEQ ID NO:37 or 39, or the nucleotide sequence of the DNA insert of the plasmid deposited with ATCC as Accession Number ______, or of a naturally occurring allelic variant or mutant of SEQ ID NO:37 or 39, or the nucleotide sequence of the DNA insert of the plasmid deposited with ATCC as Accession Number ______.

[1854] Exemplary probes or primers are at least 12, 15, 20, 25, 30, 35, 40, 45, 50, 55, 60, 65, 70, 75 or more nucleotides in length and/or comprise consecutive nucleotides of an isolated nucleic acid molecule described herein. Probes based on the HNMDA-1 nucleotide sequences can be used to detect (e.g., specifically detect) transcripts or genomic sequences encoding the same or homologous polypeptides. In preferred embodiments, the probe further comprises a label group attached thereto, e.g., the label group can be a radioisotope, a fluorescent compound, an enzyme, or an enzyme co-factor. In another embodiment a set of primers is provided, e.g., primers suitable for use in a PCR, which can be used to amplify a selected region of an HNMDA-1 sequence, e.g., a domain, region, site or other sequence described herein. The primers should be at least 5, 10, 20, 30, 40, 50, 60, 70, 80, 90, 100 or more nucleotides in length. Such probes can be used as a part of a diagnostic test kit for identifying cells or tissue which misexpress an HNMDA-1 polypeptide, such as by measuring a level of an HNMDA-1-encoding nucleic acid in a sample of cells from a subject e.g., detecting HNMDA-1 mRNA levels or determining whether a genomic HNMDA-1 gene has been mutated or deleted.

[1855] A nucleic acid fragment encoding a “biologically active portion of an HNMDA-1 polypeptide” can be prepared by isolating a portion of the nucleotide sequence of SEQ ID NO:37 or 39, or the nucleotide sequence of the DNA insert of the plasmid deposited with ATCC as Accession Number ______, which encodes a polypeptide having an HNMDA-1 biological activity (the biological activities of the HNMDA-1 polypeptides are described herein), expressing the encoded portion of the HNMDA-1 polypeptide (e.g., by recombinant expression in vitro) and assessing the activity of the encoded portion of the HNMDA-1 polypeptide. In an exemplary embodiment, the nucleic acid molecule is at least 50-100, 100-250, 250-500, 500-750, 750-1000, 1000-1250, 1250-1500, 1500-1750, 1750-1900, 1900-2150, 2150-2400, 2400-2650, 2650-2900, 2900-3150, 3150-3400, 3400-3650, 3650-3900, 3900-4150 or more nucleotides in length and encodes a polypeptide having an HNMDA-1 activity (as described herein).

[1856] The invention further encompasses nucleic acid molecules that differ from the nucleotide sequence shown in SEQ ID NO:37 or 39, or the nucleotide sequence of the DNA insert of the plasmid deposited with ATCC as Accession Number ______. Such differences can be due to due to degeneracy of the genetic code, thus resulting in a nucleic acid which encodes the same HNMDA-1 polypeptides as those encoded by the nucleotide sequence shown in SEQ ID NO:37 or 39, or the nucleotide sequence of the DNA insert of the plasmid deposited with ATCC as Accession Number ______. In another embodiment, an isolated nucleic acid molecule of the invention has a nucleotide sequence encoding a polypeptide having an amino acid sequence which differs by at least 1, but no greater than 5, 10, 20, 50 or 100 amino acid residues from the amino acid sequence shown in SEQ ID NO:38, or the amino acid sequence encoded by the DNA insert of the plasmid deposited with the ATCC as Accession Number ______. In yet another embodiment, the nucleic acid molecule encodes the amino acid sequence of HNMDA-1. If an alignment is needed for this comparison, the sequences should be aligned for maximum homology.

[1857] Nucleic acid variants can be naturally occurring, such as allelic variants (same locus), homologues (different locus), and orthologues (different organism) or can be non naturally occurring. Non-naturally occurring variants can be made by mutagenesis techniques, including those applied to polynucleotides, cells, or organisms. The variants can contain nucleotide substitutions, deletions, inversions and insertions. Variation can occur in either or both the coding and non-coding regions. The variations can produce both conservative and non-conservative amino acid substitutions (as compared in the encoded product).

[1858] Allelic variants result, for example, from DNA sequence polymorphisms within a population (e.g., the human population) that lead to changes in the amino acid sequences of the HNMDA-1 polypeptides. Such genetic polymorphism in the HNMDA-1 genes may exist among individuals within a population due to natural allelic variation. As used herein, the terms “gene” and “recombinant gene” refer to nucleic acid molecules which include an open reading frame encoding an HNMDA-1 polypeptide, preferably a mammalian HNMDA-1 polypeptide, and can further include non-coding regulatory sequences, and introns.

[1859] Accordingly, in one embodiment, the invention features isolated nucleic acid molecules which encode a naturally occurring allelic variant of a polypeptide comprising the amino acid sequence of SEQ ID NO:38, or an amino acid sequence encoded by the DNA insert of the plasmid deposited with ATCC as Accession Number ______, wherein the nucleic acid molecule hybridizes to a complement of a nucleic acid molecule comprising SEQ ID NO:37 or 39, for example, under stringent hybridization conditions.

[1860] Allelic variants of HNMDA-1 include both functional and non-functional HNMDA-1 polypeptides. Functional allelic variants are naturally occurring amino acid sequence variants of the HNMDA-1 polypeptide that have an HNMDA-1 activity, e.g., maintain the ability to bind an HNMDA-1 ligand or substrate (e.g., L-glutamate and/or glycine) and/or modulate Ca²⁺ transport. Functional allelic variants will typically contain only conservative substitution of one or more amino acids of SEQ ID NO:38, or substitution, deletion or insertion of non-critical residues in non-critical regions of the polypeptide.

[1861] Non-functional allelic variants are naturally occurring amino acid sequence variants of the HNMDA-1 polypeptide that do not have an HNMDA-1 activity, e.g., they do not have the ability to transport Ca²⁺ into and out of cells or to bind L-glutamate and/or glycine. Non-functional allelic variants will typically contain a non-conservative substitution, a deletion, or insertion or premature truncation of the amino acid sequence of SEQ ID NO:38, or a substitution, insertion or deletion in critical residues or critical regions.

[1862] The present invention further provides non-human orthologues of the HNMDA-1 polypeptide. Orthologues of HNMDA-1 polypeptides are polypeptides that are isolated from non-human organisms and possess the same HNMDA-1 activity, e.g., ligand binding and/or Ca²⁺ transport, as the HNMDA-1 polypeptide. Orthologues of the HNMDA-1 polypeptide can readily be identified as comprising an amino acid sequence that is substantially identical to SEQ ID NO:38.

[1863] Moreover, nucleic acid molecules encoding other HNMDA-1 family members and, thus, which have a nucleotide sequence which differs from the HNMDA-1 sequences of SEQ ID NO:37 or 39, or the nucleotide sequence of the DNA insert of the plasmid deposited with ATCC as Accession Number ______, are intended to be within the scope of the invention. For example, another HNMDA-1 cDNA can be identified based on the nucleotide sequence of HNMDA-1. Moreover, nucleic acid molecules encoding HNMDA-1 polypeptides from different species, and which, thus, have a nucleotide sequence which differs from the HNMDA-1 sequences of SEQ ID NO:37 or 39, or the nucleotide sequence of the DNA insert of the plasmid deposited with ATCC as Accession Number ______ are intended to be within the scope of the invention. For example, a mouse HNMDA-1 cDNA can be identified based on the nucleotide sequence of a HNMDA-1.

[1864] Nucleic acid molecules corresponding to natural allelic variants and homologues of the HNMDA-1 cDNAs of the invention can be isolated based on their homology to the HNMDA-1 nucleic acids disclosed herein using the cDNAs disclosed herein, or a portion thereof, as a hybridization probe according to standard hybridization techniques under stringent hybridization conditions. Nucleic acid molecules corresponding to natural allelic variants and homologues of the HNMDA-1 cDNAs of the invention can further be isolated by mapping to the same chromosome or locus as the HNMDA-1 gene.

[1865] Orthologues, homologues and allelic variants can be identified using methods known in the art (e.g., by hybridization to an isolated nucleic acid molecule of the present invention, for example, under stringent hybridization conditions). In one embodiment, an isolated nucleic acid molecule of the invention is at least 15, 20, 25, 30 or more nucleotides in length and hybridizes under stringent conditions to the nucleic acid molecule comprising the nucleotide sequence of SEQ ID NO:37 or 39, or the nucleotide sequence of the DNA insert of the plasmid deposited with ATCC as Accession Number ______. In other embodiment, the nucleic acid is at least 100, 150, 200, 250, 300, 350, 400, 450, 500, 550, 600, 650, 700, 750, 800, 850, 900, 950, 100, 200, 300, 400, 500, 600, 700, 800, 900, 1000, 1100, 1200, 1300, 1400, 1500, 1600, 1700, 1800, 1900, 2000, 2100, 2200, 2300, 2400, 2500, 2600, 2700, 2800, 2900, 3000, 3100, 3200, 3300, 3400, 3500, 3600, 3700, 3800, 3900, 4000, 4100 or more nucleotides in length.

[1866] As used herein, the term “hybridizes under stringent conditions” is intended to describe conditions for hybridization and washing under which nucleotide sequences that are significantly identical or homologous to each other remain hybridized to each other. Preferably, the conditions are such that sequences at least about 70%, more preferably at least about 80%, even more preferably at least about 85% or 90% identical to each other remain hybridized to each other. Such stringent conditions are known to those skilled in the art and can be found in Current Protocols in Molecular Biology, Ausubel et al., eds., John Wiley & Sons, Inc. (1995), sections 2, 4 and 6. Additional stringent conditions can be found in Molecular Cloning: A Laboratory Manual, Sambrook et al., Cold Spring Harbor Press, Cold Spring Harbor, N.Y. (1989), chapters 7, 9 and 11. A preferred, non-limiting example of stringent hybridization conditions includes hybridization in 4×sodium chloride/sodium citrate (SSC), at about 65-70° C. (or hybridization in 4×SSC plus 50% formamide at about 42-50° C.) followed by one or more washes in 1×SSC, at about 65-70° C. A preferred, non-limiting example of highly stringent hybridization conditions includes hybridization in 1×SSC, at about 65-70° C. (or hybridization in 1×SSC plus 50% formamide at about 42-50° C.) followed by one or more washes in 0.3×SSC, at about 65-70° C. A preferred, non-limiting example of reduced stringency hybridization conditions includes hybridization in 4×SSC, at about 50-60° C. (or alternatively hybridization in 6×SSC plus 50% formamide at about 40-45° C.) followed by one or more washes in 2×SSC, at about 50-60° C. Ranges intermediate to the above-recited values, e.g., at 65-70° C. or at 42-50° C. are also intended to be encompassed by the present invention. SSPE (1×SSPE is 0.15M NaCl, 10 mM NaH₂PO₄, and 1.25 mM EDTA, pH 7.4) can be substituted for SSC (1×SSC is 0.15M NaCl and 15 mM sodium citrate) in the hybridization and wash buffers; washes are performed for 15 minutes each after hybridization is complete. The hybridization temperature for hybrids anticipated to be less than 50 base pairs in length should be 5-10° C. less than the melting temperature (Tₘ) of the hybrid, where Tₘ is determined according to the following equations. For hybrids less than 18 base pairs in length, Tₘ(° C.)=2(# of A+T bases)+4(# of G+C bases). For hybrids between 18 and 49 base pairs in length, Tₘ(° C.)=81.5+16.6(log₁₀[Na⁺])+0.41(%G+C)−(600/N), where N is the number of bases in the hybrid, and [Na⁺] is the concentration of sodium ions in the hybridization buffer ([Na⁺] for 1×SSC=0.165 M). It will also be recognized by the skilled practitioner that additional reagents may be added to hybridization and/or wash buffers to decrease non-specific hybridization of nucleic acid molecules to membranes, for example, nitrocellulose or nylon membranes, including but not limited to blocking agents (e.g., BSA or salmon or herring sperm carrier DNA), detergents (e.g., SDS), chelating agents (e.g., EDTA), Ficoll, PVP and the like. When using nylon membranes, in particular, an additional preferred, non-limiting example of stringent hybridization conditions is hybridization in 0.25-0.5M NaH₂PO₄, 7% SDS at about 65° C., followed by one or more washes at 0.02M NaH₂PO₄, 1% SDS at 65° C., see e.g., Church and Gilbert (1984) Proc. Natl. Acad. Sci. USA 81:1991-1995, (or alternatively 0.2×SSC, 1% SDS).

[1867] Preferably, an isolated nucleic acid molecule of the invention that hybridizes under stringent conditions to the sequence of SEQ ID NO:37 or 39 and corresponds to a naturally-occurring nucleic acid molecule. As used herein, a “naturally-occurring” nucleic acid molecule refers to an RNA or DNA molecule having a nucleotide sequence that occurs in nature (e.g., encodes a natural polypeptide).

[1868] In addition to naturally-occurring allelic variants of the HNMDA-1 sequences that may exist in the population, the skilled artisan will further appreciate that changes can be introduced by mutation into the nucleotide sequences of SEQ ID NO:37 or 39, or the nucleotide sequence of the DNA insert of the plasmid deposited with ATCC as Accession Number ______, thereby leading to changes in the amino acid sequence of the encoded HNMDA-1 polypeptides, without altering the functional ability of the HNMDA-1 polypeptides. For example, nucleotide substitutions leading to amino acid substitutions at “non-essential” amino acid residues can be made in the sequence of SEQ ID NO:37 or 39, or the nucleotide sequence of the DNA insert of the plasmid deposited with ATCC as Accession Number ______. A “non-essential” amino acid residue is a residue that can be altered from the wild-type sequence of HNMDA-1 (e.g., the sequence of SEQ ID NO:38) without altering the biological activity, whereas an “essential” amino acid residue is required for biological activity. For example, amino acid residues that are conserved among the HNMDA-1 polypeptides of the present invention, e.g., those present in a transmembrane domain, a signal peptide, a ligand-gated ion channel family domain, and/or a glutamate-gated ion channel family domain, are predicted to be particularly unamenable to alteration. Furthermore, additional amino acid residues that are conserved between the HNMDA-1 polypeptides of the present invention and other members of the HNMDA-1 family are not likely to be amenable to alteration.

[1869] Accordingly, another aspect of the invention pertains to nucleic acid molecules encoding HNMDA-1 polypeptides that contain changes in amino acid residues that are not essential for activity. Such HNMDA-1 polypeptides differ in amino acid sequence from SEQ ID NO:38, yet retain biological activity. In one embodiment, the isolated nucleic acid molecule comprises a nucleotide sequence encoding a polypeptide, wherein the polypeptide comprises an amino acid sequence at least about 50%, 55%, 60%, 65%, 70%, 75%, 80%, 85%, 90%, 95%, 96%, 97%, 98%, 99% or more identical to SEQ ID NO:38 (e.g., to the entire length of SEQ ID NO:38).

[1870] An isolated nucleic acid molecule encoding an HNMDA-1 polypeptide identical to the polypeptide of SEQ ID NO:38, can be created by introducing one or more nucleotide substitutions, additions or deletions into the nucleotide sequence of SEQ ID NO:37 or 39, or the nucleotide sequence of the DNA insert of the plasmid deposited with ATCC as Accession Number _______, such that one or more amino acid substitutions, additions or deletions are introduced into the encoded polypeptide. Mutations can be introduced into SEQ ID NO:37 or 39, or the nucleotide sequence of the DNA insert of the plasmid deposited with ATCC as Accession Number ______ by standard techniques, such as site-directed mutagenesis and PCR-mediated mutagenesis. Preferably, conservative amino acid substitutions are made at one or more predicted non-essential amino acid residues. A “conservative amino acid substitution” is one in which the amino acid residue is replaced with an amino acid residue having a similar side chain. Families of amino acid residues having similar side chains have been defined in the art. These families include amino acids with basic side chains (e.g., lysine, arginine, histidine), acidic side chains (e.g., aspartic acid, glutamic acid), uncharged polar side chains (e.g., glycine, asparagine, glutamine, serine, threonine, tyrosine, cysteine, tryptophan), nonpolar side chains (e.g., alanine, valine, leucine, isoleucine, proline, phenylalanine, methionine), beta-branched side chains (e.g., threonine, valine, isoleucine) and aromatic side chains (e.g., tyrosine, phenylalanine, tryptophan, histidine). Thus, a predicted nonessential amino acid residue in an HNMDA-1 polypeptide is preferably replaced with another amino acid residue from the same side chain family. Alternatively, in another embodiment, mutations can be introduced randomly along all or part of an HNMDA-1 coding sequence, such as by saturation mutagenesis, and the resultant mutants can be screened for HNMDA-1 biological activity to identify mutants that retain activity. Following mutagenesis of SEQ ID NO:37 or 39, or the nucleotide sequence of the DNA insert of the plasmid deposited with ATCC as Accession Number ______, the encoded polypeptide can be expressed recombinantly and the activity of the polypeptide can be determined.

[1871] In a preferred embodiment, a mutant HNMDA-1 polypeptide can be assayed for the ability to (1) modulate Ca²⁺ transport across a cell membrane, (2) modulate intracellular Ca²⁺ concentration, (3) bind a ligand, e.g., L-glutamate, and/or glycine, (4) influence long term synapse potentiation, (5) modulate synapse formation, e.g., synapse formation related to memory or learning, and/or (6) modulate synapse formation related to the formation of neural networks during development.

[1872] In addition to the nucleic acid molecules encoding HNMDA-1 polypeptides described above, another aspect of the invention pertains to isolated nucleic acid molecules which are antisense thereto. In an exemplary embodiment, the invention provides an isolated nucleic acid molecule which is antisense to an HNMDA-1 nucleic acid molecule (e.g., is antisense to the coding strand of an HNMDA-1 nucleic acid molecule). An “antisense” nucleic acid comprises a nucleotide sequence which is complementary to a “sense” nucleic acid encoding a polypeptide, e.g., complementary to the coding strand of a double-stranded cDNA molecule or complementary to an mRNA sequence. Accordingly, an antisense nucleic acid can hydrogen bond to a sense nucleic acid. The antisense nucleic acid can be complementary to an entire HNMDA-1 coding strand, or to only a portion thereof. In one embodiment, an antisense nucleic acid molecule is antisense to a “coding region” of the coding strand of a nucleotide sequence encoding HNMDA-1. The term “coding region” refers to the region of the nucleotide sequence comprising codons which are translated into amino acid residues (e.g., the coding region of HNMDA-1 corresponds to SEQ ID NO:39). In another embodiment, the antisense nucleic acid molecule is antisense to a “noncoding region” of the coding strand of a nucleotide sequence encoding HNMDA-1. The term “noncoding region” refers to 5′ and 3′ sequences which flank the coding region that are not translated into amino acids (i.e., also referred to as 5′ and 3′ untranslated regions).

[1873] Given the coding strand sequences encoding HNMDA-1 disclosed herein (e.g., SEQ ID NO:39), antisense nucleic acids of the invention can be designed according to the rules of Watson and Crick base pairing. The antisense nucleic acid molecule can be complementary to the entire coding region of HNMDA-1 mRNA, but more preferably is an oligonucleotide which is antisense to only a portion of the coding or noncoding region of HNMDA-1 mRNA. For example, the antisense oligonucleotide can be complementary to the region surrounding the translation start site of HNMDA-1 mRNA (e.g., between the −10 and +10 regions of the start site of a gene nucleotide sequence). An antisense oligonucleotide can be, for example, about 5, 10, 15, 20, 25, 30, 35, 40, 45 or 50 nucleotides in length. An antisense nucleic acid of the invention can be constructed using chemical synthesis and enzymatic ligation reactions using procedures known in the art. For example, an antisense nucleic acid (e.g., an antisense oligonucleotide) can be chemically synthesized using naturally occurring nucleotides or variously modified nucleotides designed to increase the biological stability of the molecules or to increase the physical stability of the duplex formed between the antisense and sense nucleic acids, e.g., phosphorothioate derivatives and acridine substituted nucleotides can be used. Examples of modified nucleotides which can be used to generate the antisense nucleic acid include 5-fluorouracil, 5-bromouracil, 5-chlorouracil, 5-iodouracil, hypoxanthine, xantine, 4-acetylcytosine, 5-(carboxyhydroxylmethyl) uracil, 5-carboxymethylaminomethyl-2-thiouridine, 5-carboxymethylaminomethyluracil, dihydrouracil, beta-D-galactosylqueosine, inosine, N6-isopentenyladenine, 1-methylguanine, 1-methylinosine, 2,2-dimethylguanine, 2-methyladenine, 2-methylguanine, 3-methylcytosine, 5-methylcytosine, N6-adenine, 7-methylguanine, 5-methylaminomethyluracil, 5-methoxyaminomethyl-2-thiouracil, beta-D-mannosylqueosine, 5′-methoxycarboxymethyluracil, 5-methoxyuracil, 2-methylthio-N6-isopentenyladenine, uracil-5-oxyacetic acid (v), wybutoxosine, pseudouracil, queosine, 2-thiocytosine, 5-methyl-2-thiouracil, 2-thiouracil, 4-thiouracil, 5-methyluracil, uracil-5-oxyacetic acid methylester, uracil-5-oxyacetic acid (v), 5-methyl-2-thiouracil, 3-(3-amino-3-N-2-carboxypropyl) uracil, (acp3)w, and 2,6-diaminopurine. Alternatively, the antisense nucleic acid can be produced biologically using an expression vector into which a nucleic acid has been subcloned in an antisense orientation (i.e., RNA transcribed from the inserted nucleic acid will be of an antisense orientation to a target nucleic acid of interest, described further in the following subsection).

[1874] The antisense nucleic acid molecules of the invention are typically administered to a subject or generated in situ such that they hybridize with or bind to cellular mRNA and/or genomic DNA encoding an HNMDA-1 polypeptide to thereby inhibit expression of the polypeptide, e.g., by inhibiting transcription and/or translation. The hybridization can be by conventional nucleotide complementarity to form a stable duplex, or, for example, in the case of an antisense nucleic acid molecule which binds to DNA duplexes, through specific interactions in the major groove of the double helix. An example of a route of administration of antisense nucleic acid molecules of the invention include direct injection at a tissue site. Alternatively, antisense nucleic acid molecules can be modified to target selected cells and then administered systemically. For example, for systemic administration, antisense molecules can be modified such that they specifically bind to receptors or antigens expressed on a selected cell surface, e.g., by linking the antisense nucleic acid molecules to peptides or antibodies which bind to cell surface receptors or antigens. The antisense nucleic acid molecules can also be delivered to cells using the vectors described herein. To achieve sufficient intracellular concentrations of the antisense molecules, vector constructs in which the antisense nucleic acid molecule is placed under the control of a strong pol II or pol III promoter are preferred.

[1875] In yet another embodiment, the antisense nucleic acid molecule of the invention is an α-anomeric nucleic acid molecule. An α-anomeric nucleic acid molecule forms specific double-stranded hybrids with complementary RNA in which, contrary to the usual β-units, the strands run parallel to each other (Gaultier et al. (1987) Nucleic Acids. Res. 15:6625-6641). The antisense nucleic acid molecule can also comprise a 2′-o-methylribonucleotide (Inoue et al. (1987) Nucleic Acids Res. 15:6131-6148) or a chimeric RNA-DNA analogue (Inoue et al. (1987) FEBS Lett. 215:327-330).

[1876] In still another embodiment, an antisense nucleic acid of the invention is a ribozyme. Ribozymes are catalytic RNA molecules with ribonuclease activity which are capable of cleaving a single-stranded nucleic acid, such as an mRNA, to which they have a complementary region. Thus, ribozymes (e.g., hammerhead ribozymes (described in Haseloff and Gerlach (1988) Nature 334:585-591)) can be used to catalytically cleave HNMDA-1 mRNA transcripts to thereby inhibit translation of HNMDA-1 mRNA. A ribozyme having specificity for an HNMDA-1-encoding nucleic acid can be designed based upon the nucleotide sequence of an HNMDA-1 cDNA disclosed herein (i.e., SEQ ID NO:37 or 39, or the nucleotide sequence of the DNA insert of the plasmid deposited with ATCC as Accession Number ______). For example, a derivative of a Tetrahymena L-19 IVS RNA can be constructed in which the nucleotide sequence of the active site is complementary to the nucleotide sequence to be cleaved in an HNMDA-1-encoding mRNA. See, e.g., Cech et al. U.S. Pat. No. 4,987,071; and Cech et al. U.S. Pat. No. 5,116,742. Alternatively, HNMDA-1 mRNA can be used to select a catalytic RNA having a specific ribonuclease activity from a pool of RNA molecules. See, e.g., Bartel, D. and Szostak, J. W. (1993) Science 261:1411-1418.

[1877] Alternatively, HNMDA-1 gene expression can be inhibited by targeting nucleotide sequences complementary to the regulatory region of the HNMDA-1 (e.g., the HNMDA-1 promoter and/or enhancers) to form triple helical structures that prevent transcription of the HNMDA-1 gene in target cells. See generally, Helene, C. (1991) Anticancer Drug Des. 6(6):569-84; Helene, C. et al. (1992) Ann. N.Y. Acad. Sci. 660:27-36; and Maher, L. J. (1992) Bioassays 14(12):807-15.

[1878] In yet another embodiment, the HNMDA-1 nucleic acid molecules of the present invention can be modified at the base moiety, sugar moiety or phosphate backbone to improve, e.g., the stability, hybridization, or solubility of the molecule. For example, the deoxyribose phosphate backbone of the nucleic acid molecules can be modified to generate peptide nucleic acids (see Hyrup B. et al. (1996) Bioorganic & Medicinal Chemistry 4 (1): 5-23). As used herein, the terms “peptide nucleic acids” or “PNAs” refer to nucleic acid mimics, e.g., DNA mimics, in which the deoxyribose phosphate backbone is replaced by a pseudopeptide backbone and only the four natural nucleobases are retained. The neutral backbone of PNAs has been shown to allow for specific hybridization to DNA and RNA under conditions of low ionic strength. The synthesis of PNA oligomers can be performed using standard solid phase peptide synthesis protocols as described in Hyrup B. et al. (1996) supra; Perry-O'Keefe et al. Proc. Natl. Acad. Sci. 93: 14670-675.

[1879] PNAs of HNMDA-1 nucleic acid molecules can be used in therapeutic and diagnostic applications. For example, PNAs can be used as antisense or antigene agents for sequence-specific modulation of gene expression by, for example, inducing transcription or translation arrest or inhibiting replication. PNAs of HNMDA-1 nucleic acid molecules can also be used in the analysis of single base pair mutations in a gene, (e.g., by PNA-directed PCR clamping); as ‘artificial restriction enzymes’ when used in combination with other enzymes, (e.g., S1 nucleases (Hyrup B. (1996) supra)); or as probes or primers for DNA sequencing or hybridization (Hyrup B. et al. (1996) supra; Perry-O'Keefe supra).

[1880] In another embodiment, PNAs of HNMDA-1 can be modified, (e.g., to enhance their stability or cellular uptake), by attaching lipophilic or other helper groups to PNA, by the formation of PNA-DNA chimeras, or by the use of liposomes or other techniques of drug delivery known in the art. For example, PNA-DNA chimeras of HNMDA-1 nucleic acid molecules can be generated which may combine the advantageous properties of PNA and DNA. Such chimeras allow DNA recognition enzymes, (e.g., RNase H and DNA polymerases), to interact with the DNA portion while the PNA portion would provide high binding affinity and specificity. PNA-DNA chimeras can be linked using linkers of appropriate lengths selected in terms of base stacking, number of bonds between the nucleobases, and orientation (Hyrup B. (1996) supra). The synthesis of PNA-DNA chimeras can be performed as described in Hyrup B. (1996) supra and Finn P. J. et al. (1996) Nucleic Acids Res. 24 (17): 3357-63. For example, a DNA chain can be synthesized on a solid support using standard phosphoramidite coupling chemistry and modified nucleoside analogs, e.g., 5′-(4-methoxytrityl)amino-5′-deoxy-thymidine phosphoramidite, can be used as a between the PNA and the 5′ end of DNA (Mag, M. et al. (1989) Nucleic Acid Res. 17: 5973-88). PNA monomers are then coupled in a stepwise manner to produce a chimeric molecule with a 5′ PNA segment and a 3′ DNA segment (Finn P. J. et al. (1996) supra). Alternatively, chimeric molecules can be synthesized with a 5′ DNA segment and a 3′ PNA segment (Peterser, K. H. et al. (1975) Bioorganic Med. Chem. Lett. 5: 1119-11124).

[1881] In other embodiments, the oligonucleotide may include other appended groups such as peptides (e.g., for targeting host cell receptors in vivo), or agents facilitating transport across the cell membrane (see, e.g., Letsinger et al. (1989) Proc. Natl. Acad. Sci. USA 86:6553-6556; Lemaitre et al. (1987) Proc. Natl. Acad. Sci. USA 84:648-652; PCT Publication No. W088/09810) or the blood-brain barrier (see, e.g., PCT Publication No. W089/10134). In addition, oligonucleotides can be modified with hybridization-triggered cleavage agents (See, e.g., Krol et al. (1988) Bio-Techniques 6:958-976) or intercalating agents. (See, e.g., Zon (1988) Pharm. Res. 5:539-549). To this end, the oligonucleotide may be conjugated to another molecule, (e.g., a peptide, hybridization triggered cross-linking agent, transport agent, or hybridization-triggered cleavage agent).

[1882] Alternatively, the expression characteristics of an endogenous HNMDA-1 gene within a cell line or microorganism may be modified by inserting a heterologous DNA regulatory element into the genome of a stable cell line or cloned microorganism such that the inserted regulatory element is operatively linked with the endogenous HNMDA-1 gene. For example, an endogenous HNMDA-1 gene which is normally “transcriptionally silent”, i.e., an HNMDA-1 gene which is normally not expressed, or is expressed only at very low levels in a cell line or microorganism, may be activated by inserting a regulatory element which is capable of promoting the expression of a normally expressed gene product in that cell line or microorganism. Alternatively, a transcriptionally silent, endogenous HNMDA-1 gene may be activated by insertion of a promiscuous regulatory element that works across cell types.

[1883] A heterologous regulatory element may be inserted into a stable cell line or cloned microorganism, such that it is operatively linked with an endogenous HNMDA-1 gene, using techniques, such as targeted homologous recombination, which are well known to those of skill in the art, and described, e.g., in Chappel, U.S. Pat. No. 5,272,071; PCT publication No. WO 91/06667, published May 16, 1991.

[1884] II. Isolated HNMDA-1 Polypeptides and Anti-HNMDA-1 Antibodies

[1885] One aspect of the invention pertains to isolated HNMDA-1 or recombinant polypeptides and polypeptides, and biologically active portions thereof, as well as polypeptide fragments suitable for use as immunogens to raise anti-HNMDA-1 antibodies. In one embodiment, native HNMDA-1 polypeptides can be isolated from cells or tissue sources by an appropriate purification scheme using standard protein purification techniques. In another embodiment, HNMDA-1 polypeptides are produced by recombinant DNA techniques. Alternative to recombinant expression, an HNMDA-1 polypeptide or polypeptide can be synthesized chemically using standard peptide synthesis techniques.

[1886] An “isolated” or “purified” polypeptide or biologically active portion thereof is substantially free of cellular material or other contaminating proteins from the cell or tissue source from which the HNMDA-1 polypeptide is derived, or substantially free from chemical precursors or other chemicals when chemically synthesized. The language “substantially free of cellular material” includes preparations of HNMDA-1 polypeptide in which the polypeptide is separated from cellular components of the cells from which it is isolated or recombinantly produced. In one embodiment, the language “substantially free of cellular material” includes preparations of HNMDA-1 polypeptide having less than about 30% (by dry weight) of non-HNMDA-1 polypeptide (also referred to herein as a “contaminating protein”), more preferably less than about 20% of non-HNMDA-1 polypeptide, still more preferably less than about 10% of non-HNMDA-1 polypeptide, and most preferably less than about 5% non-HNMDA-1 polypeptide. When the HNMDA-1 polypeptide or biologically active portion thereof is recombinantly produced, it is also preferably substantially free of culture medium, i.e., culture medium represents less than about 20%, more preferably less than about 10%, and most preferably less than about 5% of the volume of the protein preparation.

[1887] The language “substantially free of chemical precursors or other chemicals” includes preparations of HNMDA-1 polypeptide in which the polypeptide is separated from chemical precursors or other chemicals which are involved in the synthesis of the polypeptide. In one embodiment, the language “substantially free of chemical precursors or other chemicals” includes preparations of HNMDA-1 polypeptide having less than about 30% (by dry weight) of chemical precursors or non-HNMDA-1 chemicals, more preferably less than about 20% chemical precursors or non-HNMDA-1 chemicals, still more preferably less than about 10% chemical precursors or non-HNMDA-1 chemicals, and most preferably less than about 5% chemical precursors or non-HNMDA-1 chemicals.

[1888] As used herein, a “biologically active portion” of an HNMDA-1 polypeptide includes a fragment of an HNMDA-1 polypeptide which participates in an interaction between an HNMDA-1 molecule and a non-HNMDA-1 molecule. Biologically active portions of an HNMDA-1 polypeptide include peptides comprising amino acid sequences sufficiently identical to or derived from the amino acid sequence of the HNMDA-1 polypeptide, e.g., the amino acid sequence shown in SEQ ID NO:38, which include less amino acids than the full length HNMDA-1 polypeptides, and exhibit at least one activity of an HNMDA-1 polypeptide. Typically, biologically active portions comprise a domain or motif with at least one activity of the HNMDA-1 polypeptide, e.g., the ability to bind L-glutamate or glycine or the ability to modulate Ca²⁺ transport. A biologically active portion of an HNMDA-1 polypeptide can be a polypeptide which is, for example, 25, 30, 35, 40, 45, 50, 75, 100, 125, 150, 175, 200, 225, 250, 275, 300, 325, 350, 375, 400, 425, 450, 475, 500, 525, 550, 575, 600, 625, 650, 675, 700, 725, 750, 775, 800, 825, 850, 875, 900, 925, 950, 975, 1000, 1025, 1050, 1075, 1100 or more amino acids in length. Biologically active portions of an HNMDA-1 polypeptide can be used as targets for developing agents which modulate an HNMDA-1 mediated activity, e.g., a long term synapse potentiation.

[1889] In one embodiment, a biologically active portion of an HNMDA-1 polypeptide comprises at least one glutamate-gated ion channel family. It is to be understood that a preferred biologically active portion of an HNMDA-1 polypeptide of the present invention comprises at least one or more of the following domains: a transmembrane domain, a signal peptide, a ligand-gated ion channel family domain and/or a glutamate-gated ion channel family domain. Moreover, other biologically active portions, in which other regions of the polypeptide are deleted, can be prepared by recombinant techniques and evaluated for one or more of the functional activities of a native HNMDA-1 polypeptide.

[1890] Another aspect of the invention features fragments of the polypeptide having the amino acid sequence of SEQ ID NO:38, for example, for use as immunogens. In one embodiment, a fragment comprises at least 5 amino acids (e.g., contiguous or consecutive amino acids) of the amino acid sequence of SEQ ID NO:38, or an amino acid sequence encoded by the DNA insert of the plasmid deposited with the ATCC as Accession Number ______. In another embodiment, a fragment comprises at least 10, 15, 20, 25, 30, 35, 40, 45, 50 or more amino acids (e.g., contiguous or consecutive amino acids) of the amino acid sequence of SEQ ID NO:38, or an amino acid sequence encoded by the DNA insert of the plasmid deposited with the ATCC as Accession Number ______.

[1891] In a preferred embodiment, an HNMDA-1 polypeptide has an amino acid sequence shown in SEQ ID NO:38. In other embodiments, the HNMDA-1 polypeptide is substantially identical to SEQ ID NO:38, and retains the functional activity of the polypeptide of SEQ ID NO:38, yet differs in amino acid sequence due to natural allelic variation or mutagenesis, as described in detail in subsection I above. In another embodiment, the HNMDA-1 polypeptide is a polypeptide which comprises an amino acid sequence at least about 50%, 55%, 60%, 65%, 70%, 75%, 80%, 85%, 90%, 95%, 96%, 97%, 98%, 99% or more identical to SEQ ID NO:38.

[1892] In another embodiment, the invention features an HNMDA-1 polypeptide which is encoded by a nucleic acid molecule consisting of a nucleotide sequence at least about 50%, 55%, 60%, 65%, 70%, 75%, 80%, 85%, 90%, 95%, 96%, 97%, 98%, 99% or more identical to a nucleotide sequence of SEQ ID NO:37 or 39, or a complement thereof. This invention further features an HNMDA-1 polypeptide which is encoded by a nucleic acid molecule consisting of a nucleotide sequence which hybridizes under stringent hybridization conditions to a complement of a nucleic acid molecule comprising the nucleotide sequence of SEQ ID NO:37 or 39, or a complement thereof.

[1893] To determine the percent identity of two amino acid sequences or of two nucleic acid sequences, the sequences are aligned for optimal comparison purposes (e.g., gaps can be introduced in one or both of a first and a second amino acid or nucleic acid sequence for optimal alignment and non-identical sequences can be disregarded for comparison purposes). In a preferred embodiment, the length of a reference sequence aligned for comparison purposes is at least 30%, preferably at least 40%, more preferably at least 50%, even more preferably at least 60%, and even more preferably at least 70%, 80%, or 90% of the length of the reference sequence (e.g., when aligning a second sequence to the HNMDA-1 amino acid sequence of SEQ ID NO:38 having 1115 amino acid residues, at least 334, preferably at least 446, more preferably at least 557, more preferably at least 669, even more preferably at least 780, and even more preferably at least 892 or 1003 or more amino acid residues are aligned). The amino acid residues or nucleotides at corresponding amino acid positions or nucleotide positions are then compared. When a position in the first sequence is occupied by the same amino acid residue or nucleotide as the corresponding position in the second sequence, then the molecules are identical at that position (as used herein amino acid or nucleic acid “identity” is equivalent to amino acid or nucleic acid “homology”). The percent identity between the two sequences is a function of the number of identical positions shared by the sequences, taking into account the number of gaps, and the length of each gap, which need to be introduced for optimal alignment of the two sequences.

[1894] The comparison of sequences and determination of percent identity between two sequences can be accomplished using a mathematical algorithm. In a preferred embodiment, the percent identity between two amino acid sequences is determined using the Needleman and Wunsch (J. Mol. Biol. (48):444-453 (1970)) algorithm which has been incorporated into the GAP program in the GCG software package (available at http://www.gcg.com), using either a Blosum 62 matrix or a PAM250 matrix, and a gap weight of 16, 14, 12, 10, 8, 6, or 4 and a length weight of 1, 2, 3, 4, 5, or 6. In yet another preferred embodiment, the percent identity between two nucleotide sequences is determined using the GAP program in the GCG software package (available at http://www.gcg.com), using a NWSgapdna.CMP matrix and a gap weight of 40, 50, 60, 70, or 80 and a length weight of 1, 2, 3, 4, 5, or 6. A preferred, non-limiting example of parameters to be used in conjunction with the GAP program include a Blosum 62 scoring matrix with a gap penalty of 12, a gap extend penalty of 4, and a frameshift gap penalty of 5.

[1895] In another embodiment, the percent identity between two amino acid or nucleotide sequences is determined using the algorithm of E. Meyers and W. Miller (Comput. Appl. Biosci., 4:11-17 (1988)) which has been incorporated into the ALIGN program (version 2.0 or version 2.0U), using a PAM120 weight residue table, a gap length penalty of 12 and a gap penalty of 4.

[1896] The nucleic acid and polypeptide sequences of the present invention can further be used as a “query sequence” to perform a search against public databases to, for example, identify other family members or related sequences. Such searches can be performed using the NBLAST and XBLAST programs (version 2.0) of Altschul, et al. (1990) J. Mol. Biol. 215:403-10. BLAST nucleotide searches can be performed with the NBLAST program, score=100, wordlength=12 to obtain nucleotide sequences homologous to HNMDA-1 nucleic acid molecules of the invention. BLAST protein searches can be performed with the XBLAST program, score=100, wordlength=3, and a Blosum62 matrix to obtain amino acid sequences homologous to HNMDA-1 polypeptide molecules of the invention. To obtain gapped alignments for comparison purposes, Gapped BLAST can be utilized as described in Altschul et al., (1997) Nucleic Acids Res. 25(17):3389-3402. When utilizing BLAST and Gapped BLAST programs, the default parameters of the respective programs (e.g., XBLAST and NBLAST) can be used. See http://www.ncbi.nlm.nih.gov.

[1897] The invention also provides HNMDA-1 chimeric or fusion proteins. As used herein, an HNMDA-1 “chimeric protein” or “fusion protein” comprises an HNMDA-1 polypeptide operatively linked to a non-HNMDA-1 polypeptide. An “HNMDA-1 polypeptide” refers to a polypeptide having an amino acid sequence corresponding to HNMDA-1, whereas a “non-HNMDA-1 polypeptide” refers to a polypeptide having an amino acid sequence corresponding to a polypeptide which is not substantially homologous to the HNMDA-1 polypeptide, e.g., a polypeptide which is different from the HNMDA-1 polypeptide and which is derived from the same or a different organism. Within an HNMDA-1 fusion protein the HNMDA-1 polypeptide can correspond to all or a portion of an HNMDA-1 polypeptide. In a preferred embodiment, an HNMDA-1 fusion protein comprises at least one biologically active portion of an HNMDA-1 polypeptide. In another preferred embodiment, an HNMDA-1 fusion protein comprises at least two biologically active portions of an HNMDA-1 polypeptide. Within the fusion protein, the term “operatively linked” is intended to indicate that the HNMDA-1 polypeptide and the non-HNMDA-1 polypeptide are fused in-frame to each other. The non-HNMDA-1 polypeptide can be fused to the N-terminus or C-terminus of the HNMDA-1 polypeptide.

[1898] For example, in one embodiment, the fusion protein is a GST-HNMDA-1 fusion protein in which the HNMDA-1 sequences are fused to the C-terminus of the GST sequences. Such fusion proteins can facilitate the purification of recombinant HNMDA-1.

[1899] In another embodiment, the fusion protein is an HNMDA-1 polypeptide containing a heterologous signal sequence at its N-terminus. In certain host cells (e.g., mammalian host cells), expression and/or secretion of HNMDA-1 can be increased through the use of a heterologous signal sequence.

[1900] The HNMDA-1 fusion proteins of the invention can be incorporated into pharmaceutical compositions and administered to a subject in vivo. The HNMDA-1 fusion proteins can be used to affect the bioavailability of an HNMDA-1 substrate. Use of HNMDA-1 fusion proteins may be useful therapeutically for the treatment of disorders caused by, for example, (i) aberrant modification or mutation of a gene encoding an HNMDA-1 polypeptide; (ii) mis-regulation of the HNMDA-1 gene; and (iii) aberrant post-translational modification of an HNMDA-1 polypeptide.

[1901] Moreover, the HNMDA-1-fusion proteins of the invention can be used as immunogens to produce anti-HNMDA-1 antibodies in a subject, to purify HNMDA-1 ligands and in screening assays to identify molecules which inhibit the interaction of HNMDA-1 with an HNMDA-1 substrate.

[1902] Preferably, an HNMDA-1 chimeric or fusion protein of the invention is produced by standard recombinant DNA techniques. For example, DNA fragments coding for the different polypeptide sequences are ligated together in-frame in accordance with conventional techniques, for example by employing blunt-ended or stagger-ended termini for ligation, restriction enzyme digestion to provide for appropriate termini, filling-in of cohesive ends as appropriate, alkaline phosphatase treatment to avoid undesirable joining, and enzymatic ligation. In another embodiment, the fusion gene can be synthesized by conventional techniques including automated DNA synthesizers. Alternatively, PCR amplification of gene fragments can be carried out using anchor primers which give rise to complementary overhangs between two consecutive gene fragments which can subsequently be annealed and reamplified to generate a chimeric gene sequence (see, for example, Current Protocols in Molecular Biology, eds. Ausubel et al. John Wiley & Sons: 1992). Moreover, many expression vectors are commercially available that already encode a fusion moiety (e.g., a GST polypeptide). An HNMDA-1-encoding nucleic acid can be cloned into such an expression vector such that the fusion moiety is linked in-frame to the HNMDA-1 polypeptide.

[1903] The present invention also pertains to variants of the HNMDA-1 polypeptides which function as either HNMDA-1 agonists (mimetics) or as HNMDA-1 antagonists. Variants of the HNMDA-1 polypeptides can be generated by mutagenesis, e.g., discrete point mutation or truncation of an HNMDA-1 polypeptide. An agonist of the HNMDA-1 polypeptides can retain substantially the same, or a subset, of the biological activities of the naturally occurring form of an HNMDA-1 polypeptide. An antagonist of an HNMDA-1 polypeptide can inhibit one or more of the activities of the naturally occurring form of the HNMDA-1 polypeptide by, for example, competitively modulating an HNMDA-1-mediated activity of an HNMDA-1 polypeptide. Thus, specific biological effects can be elicited by treatment with a variant of limited function. In one embodiment, treatment of a subject with a variant having a subset of the biological activities of the naturally occurring form of the polypeptide has fewer side effects in a subject relative to treatment with the naturally occurring form of the HNMDA-1 polypeptide.

[1904] In one embodiment, variants of an HNMDA-1 polypeptide which function as either HNMDA-1 agonists (mimetics) or as HNMDA-1 antagonists can be identified by screening combinatorial libraries of mutants, e.g., truncation mutants, of an HNMDA-1 polypeptide for HNMDA-1 polypeptide agonist or antagonist activity. In one embodiment, a variegated library of HNMDA-1 variants is generated by combinatorial mutagenesis at the nucleic acid level and is encoded by a variegated gene library. A variegated library of HNMDA-1 variants can be produced by, for example, enzymatically ligating a mixture of synthetic oligonucleotides into gene sequences such that a degenerate set of potential HNMDA-1 sequences is expressible as individual polypeptides, or alternatively, as a set of larger fusion proteins (e.g., for phage display) containing the set of HNMDA-1 sequences therein. There are a variety of methods which can be used to produce libraries of potential HNMDA-1 variants from a degenerate oligonucleotide sequence. Chemical synthesis of a degenerate gene sequence can be performed in an automatic DNA synthesizer, and the synthetic gene then ligated into an appropriate expression vector. Use of a degenerate set of genes allows for the provision, in one mixture, of all of the sequences encoding the desired set of potential HNMDA-1 sequences. Methods for synthesizing degenerate oligonucleotides are known in the art (see, e.g., Narang, S. A. (1983) Tetrahedron 39:3; Itakura et al. (1984) Annu. Rev. Biochem. 53:323; Itakura et al. (1984) Science 198:1056; Ike et al. (1983) Nucleic Acid Res. 11:477.

[1905] In addition, libraries of fragments of an HNMDA-1 polypeptide coding sequence can be used to generate a variegated population of HNMDA-1 fragments for screening and subsequent selection of variants of an HNMDA-1 polypeptide. In one embodiment, a library of coding sequence fragments can be generated by treating a double stranded PCR fragment of an HNMDA-1 coding sequence with a nuclease under conditions wherein nicking occurs only about once per molecule, denaturing the double stranded DNA, renaturing the DNA to form double stranded DNA which can include sense/antisense pairs from different nicked products, removing single stranded portions from reformed duplexes by treatment with S1 nuclease, and ligating the resulting fragment library into an expression vector. By this method, an expression library can be derived which encodes N-terminal, C-terminal and internal fragments of various sizes of the HNMDA-1 polypeptide.

[1906] Several techniques are known in the art for screening gene products of combinatorial libraries made by point mutations or truncation, and for screening cDNA libraries for gene products having a selected property. Such techniques are adaptable for rapid screening of the gene libraries generated by the combinatorial mutagenesis of HNMDA-1 polypeptides. The most widely used techniques, which are amenable to high through-put analysis, for screening large gene libraries typically include cloning the gene library into replicable expression vectors, transforming appropriate cells with the resulting library of vectors, and expressing the combinatorial genes under conditions in which detection of a desired activity facilitates isolation of the vector encoding the gene whose product was detected. Recursive ensemble mutagenesis (REM), a new technique which enhances the frequency of functional mutants in the libraries, can be used in combination with the screening assays to identify HNMDA-1 variants (Arkin and Youvan (1992) Proc. Natl. Acad. Sci. USA 89:7811-7815; Delagrave et al. (1993) Protein Engineering 6(3):327-331).

[1907] In one embodiment, cell based assays can be exploited to analyze a variegated HNMDA-1 library. For example, a library of expression vectors can be transfected into a cell line, e.g., a neural cell line, which ordinarily responds to HNMDA-1 in a particular HNMDA-1 substrate-dependent manner. The transfected cells are then contacted with HNMDA-1 and the effect of expression of the mutant on signaling by the HNMDA-1 substrate can be detected, e.g., by monitoring intracellular calcium, IP3, or diacylglycerol concentration, phosphorylation profile of intracellular proteins, or the activity of an HNMDA-1-regulated transcription factor. Plasmid DNA can then be recovered from the cells which score for inhibition, or alternatively, potentiation of signaling by the HNMDA-1 substrate, and the individual clones further characterized.

[1908] An isolated HNMDA-1 polypeptide, or a portion or fragment thereof, can be used as an immunogen to generate antibodies that bind HNMDA-1 using standard techniques for polyclonal and monoclonal antibody preparation. A full-length HNMDA-1 polypeptide can be used or, alternatively, the invention provides antigenic peptide fragments of HNMDA-1 for use as immunogens. The antigenic peptide of HNMDA-1 comprises at least 8 amino acid residues of the amino acid sequence shown in SEQ ID NO:38 and encompasses an epitope of HNMDA-1 such that an antibody raised against the peptide forms a specific immune complex with HNMDA-1. Preferably, the antigenic peptide comprises at least 10 amino acid residues, more preferably at least 15 amino acid residues, even more preferably at least 20 amino acid residues, and most preferably at least 30 amino acid residues.

[1909] Preferred epitopes encompassed by the antigenic peptide are regions of HNMDA-1 that are located on the surface of the polypeptide, e.g., hydrophilic regions, as well as regions with high antigenicity (see, for example, FIG. 33).

[1910] An HNMDA-1 immunogen typically is used to prepare antibodies by immunizing a suitable subject, (e.g., rabbit, goat, mouse or other mammal) with the immunogen. An appropriate immunogenic preparation can contain, for example, recombinantly expressed HNMDA-1 polypeptide or a chemically synthesized HNMDA-1 polypeptide. The preparation can further include an adjuvant, such as Freund's complete or incomplete adjuvant, or similar immunostimulatory agent. Immunization of a suitable subject with an immunogenic HNMDA-1 preparation induces a polyclonal anti-HNMDA-1 antibody response.

[1911] Accordingly, another aspect of the invention pertains to anti-HNMDA-1 antibodies. The term “antibody” as used herein refers to immunoglobulin molecules and immunologically active portions of immunoglobulin molecules, i.e., molecules that contain an antigen binding site which specifically binds (immunoreacts with) an antigen, such as HNMDA-1. Examples of immunologically active portions of immunoglobulin molecules include F(ab) and F(ab′)₂ fragments which can be generated by treating the antibody with an enzyme such as pepsin. The invention provides polyclonal and monoclonal antibodies that bind HNMDA-1. The term “monoclonal antibody” or “monoclonal antibody composition”, as used herein, refers to a population of antibody molecules that contain only one species of an antigen binding site capable of immunoreacting with a particular epitope of HNMDA-1. A monoclonal antibody composition thus typically displays a single binding affinity for a particular HNMDA-1 polypeptide with which it immunoreacts.

[1912] Polyclonal anti-HNMDA-1 antibodies can be prepared as described above by immunizing a suitable subject with an HNMDA-1 immunogen. The anti-HNMDA-1 antibody titer in the immunized subject can be monitored over time by standard techniques, such as with an enzyme linked immunosorbent assay (ELISA) using immobilized HNMDA-1. If desired, the antibody molecules directed against HNMDA-1 can be isolated from the mammal (e.g., from the blood) and further purified by well known techniques, such as protein A chromatography to obtain the IgG fraction. At an appropriate time after immunization, e.g., when the anti-HNMDA-1 antibody titers are highest, antibody-producing cells can be obtained from the subject and used to prepare monoclonal antibodies by standard techniques, such as the hybridoma technique originally described by Kohler and Milstein (1975) Nature 256:495-497) (see also, Brown et al. (1981) J. Immunol. 127:539-46; Brown et al. (1980) J. Biol. Chem .255:4980-83; Yeh et al. (1976) Proc. Natl. Acad. Sci. USA 76:2927-31; and Yeh et al. (1982) Int. J. Cancer 29:269-75), the more recent human B cell hybridoma technique (Kozbor et al. (1983) Immunol Today 4:72), the EBV-hybridoma technique (Cole et al. (1985), Monoclonal Antibodies and Cancer Therapy, Alan R. Liss, Inc., pp. 77-96) or trioma techniques. The technology for producing monoclonal antibody hybridomas is well known (see generally R. H. Kenneth, in Monoclonal Antibodies: A New Dimension In Biological Analyses, Plenum Publishing Corp., New York, N.Y. (1980); E. A. Lerner (1981) Yale J. Biol. Med., 54:387-402; M. L. Gefter et al. (1977) Somatic Cell Genet. 3:231-36). Briefly, an immortal cell line (typically a myeloma) is fused to lymphocytes (typically splenocytes) from a mammal immunized with an HNMDA-1 immunogen as described above, and the culture supernatants of the resulting hybridoma cells are screened to identify a hybridoma producing a monoclonal antibody that binds HNMDA-1.

[1913] Any of the many well known protocols used for fusing lymphocytes and immortalized cell lines can be applied for the purpose of generating an anti-HNMDA-1 monoclonal antibody (see, e.g., G. Galfre et al. (1977) Nature 266:55052; Gefter et al. Somatic Cell Genet., cited supra; Lerner, Yale J. Biol. Med., cited supra; Kenneth, Monoclonal Antibodies, cited supra). Moreover, the ordinarily skilled worker will appreciate that there are many variations of such methods which also would be useful. Typically, the immortal cell line (e.g., a myeloma cell line) is derived from the same mammalian species as the lymphocytes. For example, murine hybridomas can be made by fusing lymphocytes from a mouse immunized with an immunogenic preparation of the present invention with an immortalized mouse cell line. Preferred immortal cell lines are mouse myeloma cell lines that are sensitive to culture medium containing hypoxanthine, aminopterin and thymidine (“HAT medium”). Any of a number of myeloma cell lines can be used as a fusion partner according to standard techniques, e.g., the P3-NS1/1-Ag4-1, P3-x63-Ag8.653 or Sp2/O-Ag14 myeloma lines. These myeloma lines are available from ATCC. Typically, HAT-sensitive mouse myeloma cells are fused to mouse splenocytes using polyethylene glycol (“PEG”). Hybridoma cells resulting from the fusion are then selected using HAT medium, which kills unfused and unproductively fused myeloma cells (unfused splenocytes die after several days because they are not transformed). Hybridoma cells producing a monoclonal antibody of the invention are detected by screening the hybridoma culture supernatants for antibodies that bind HNMDA-1, e.g., using a standard ELISA assay.

[1914] Alternative to preparing monoclonal antibody-secreting hybridomas, a monoclonal anti-HNMDA-1 antibody can be identified and isolated by screening a recombinant combinatorial immunoglobulin library (e.g., an antibody phage display library) with HNMDA-1 to thereby isolate immunoglobulin library members that bind HNMDA-1. Kits for generating and screening phage display libraries are commercially available (e.g., the Pharmacia Recombinant Phage Antibody System, Catalog No. 27-9400-01; and the Stratagene SurfZAP™ Phage Display Kit, Catalog No. 240612). Additionally, examples of methods and reagents particularly amenable for use in generating and screening antibody display library can be found in, for example, Ladner et al. U.S. Pat. No. 5,223,409; Kang et al. PCT International Publication No. WO 92/18619; Dower et al. PCT International Publication No. WO 91/17271; Winter et al. PCT International Publication WO 92/20791; Markland et al. PCT International Publication No. WO 92/15679; Breitling et al. PCT International Publication WO 93/01288; McCafferty et al. PCT International Publication No. WO 92/01047; Garrard et al. PCT International Publication No. WO 92/09690; Ladner et al. PCT International Publication No. WO 90/02809; Fuchs et al. (1991) Bio/Technology 9:1370-1372; Hay et al. (1992) Hum. Antibod. Hybridomas 3:81-85; Huse et al. (1989) Science 246:1275-1281; Griffiths et al. (1993) EMBO J 12:725-734; Hawkins et al. (1992) J. Mol. Biol. 226:889-896; Clackson et al. (1991) Nature 352:624-628; Gram et al. (1992) Proc. Natl. Acad. Sci. USA 89:3576-3580; Garrard et al. (1991) Bio/Technology 9:1373-1377; Hoogenboom et al. (1991) Nuc. Acid Res. 19:4133-4137; Barbas et al. (1991) Proc. Natl. Acad. Sci. USA 88:7978-7982; and McCafferty et al. Nature (1990) 348:552-554.

[1915] Additionally, recombinant anti-HNMDA-1 antibodies, such as chimeric and humanized monoclonal antibodies, comprising both human and non-human portions, which can be made using standard recombinant DNA techniques, are within the scope of the invention. Such chimeric and humanized monoclonal antibodies can be produced by recombinant DNA techniques known in the art, for example using methods described in Robinson et al. International Application No. PCT/US86/02269; Akira, et al. European Patent Application 184,187; Taniguchi, M., European Patent Application 171,496; Morrison et al. European Patent Application 173,494; Neuberger et al. PCT International Publication No. WO 86/01533; Cabilly et al. U.S. Pat. No. 4,816,567; Cabilly et al. European Patent Application 125,023; Better et al. (1988) Science 240:1041-1043; Liu et al. (1987) Proc. Natl. Acad. Sci. USA 84:3439-3443; Liu et al. (1987) J. Immunol. 139:3521-3526; Sun et al. (1987) Proc. Natl. Acad. Sci. USA 84:214-218; Nishimura et al. (1987) Canc. Res. 47:999-1005; Wood et al. (1985) Nature 314:446-449; and Shaw et al. (1988) J. Natl. Cancer Inst. 80:1553-1559); Morrison, S. L. (1985) Science 229:1202-1207; Oi et al. (1986) BioTechniques 4:214; Winter U.S. Pat. No. 5,225,539; Jones et al. (1986) Nature 321:552-525; Verhoeyen et al. (1988) Science 239:1534; and Beidler et al. (1988) J. Immunol. 141:4053-4060.

[1916] An anti-HNMDA-1 antibody (e.g., monoclonal antibody) can be used to isolate HNMDA-1 by standard techniques, such as affinity chromatography or immunoprecipitation. An anti-HNMDA-1 antibody can facilitate the purification of natural HNMDA-1 from cells and of recombinantly produced HNMDA-1 expressed in host cells. Moreover, an anti-HNMDA-1 antibody can be used to detect HNMDA-1 polypeptide (e.g., in a cellular lysate or cell supernatant) in order to evaluate the abundance and pattern of expression of the HNMDA-1 polypeptide. Anti-HNMDA-1 antibodies can be used diagnostically to monitor polypeptide levels in tissue as part of a clinical testing procedure, e.g., to, for example, determine the efficacy of a given treatment regimen. Detection can be facilitated by coupling (i.e., physically linking) the antibody to a detectable substance. Examples of detectable substances include various enzymes, prosthetic groups, fluorescent materials, luminescent materials, bioluminescent materials, and radioactive materials. Examples of suitable enzymes include horseradish peroxidase, alkaline phosphatase, β-galactosidase, or acetylcholinesterase; examples of suitable prosthetic group complexes include streptavidin/biotin and avidin/biotin; examples of suitable fluorescent materials include umbelliferone, fluorescein, fluorescein isothiocyanate, rhodamine, dichlorotriazinylamine fluorescein, dansyl chloride or phycoerythrin; an example of a luminescent material includes luminol; examples of bioluminescent materials include luciferase, luciferin, and aequorin, and examples of suitable radioactive material include ¹²⁵I, ¹³¹I, ³⁵S or ³H.

[1917] III. Recombinant Expression Vectors and Host Cells

[1918] Another aspect of the invention pertains to vectors, for example recombinant expression vectors, containing a nucleic acid containing an HNMDA-1 nucleic acid molecule or vectors containing a nucleic acid molecule which encodes an HNMDA-1 polypeptide (or a portion thereof). As used herein, the term “vector” refers to a nucleic acid molecule capable of transporting another nucleic acid to which it has been linked. One type of vector is a “plasmid”, which refers to a circular double stranded DNA loop into which additional DNA segments can be ligated. Another type of vector is a viral vector, wherein additional DNA segments can be ligated into the viral genome. Certain vectors are capable of autonomous replication in a host cell into which they are introduced (e.g., bacterial vectors having a bacterial origin of replication and episomal mammalian vectors). Other vectors (e.g., non-episomal mammalian vectors) are integrated into the genome of a host cell upon introduction into the host cell, and thereby are replicated along with the host genome. Moreover, certain vectors are capable of directing the expression of genes to which they are operatively linked. Such vectors are referred to herein as “expression vectors”. In general, expression vectors of utility in recombinant DNA techniques are often in the form of plasmids. In the present specification, “plasmid” and “vector” can be used interchangeably as the plasmid is the most commonly used form of vector. However, the invention is intended to include such other forms of expression vectors, such as viral vectors (e.g., replication defective retroviruses, adenoviruses and adeno-associated viruses), which serve equivalent functions.

[1919] The recombinant expression vectors of the invention comprise a nucleic acid of the invention in a form suitable for expression of the nucleic acid in a host cell, which means that the recombinant expression vectors include one or more regulatory sequences, selected on the basis of the host cells to be used for expression, which is operatively linked to the nucleic acid sequence to be expressed. Within a recombinant expression vector, “operably linked” is intended to mean that the nucleotide sequence of interest is linked to the regulatory sequence(s) in a manner which allows for expression of the nucleotide sequence (e.g., in an in vitro transcription/translation system or in a host cell when the vector is introduced into the host cell). The term “regulatory sequence” is intended to include promoters, enhancers and other expression control elements (e.g., polyadenylation signals). Such regulatory sequences are described, for example, in Goeddel; Gene Expression Technology: Methods in Enzymology 185, Academic Press, San Diego, Calif. (1990). Regulatory sequences include those which direct constitutive expression of a nucleotide sequence in many types of host cells and those which direct expression of the nucleotide sequence only in certain host cells (e.g., tissue-specific regulatory sequences). It will be appreciated by those skilled in the art that the design of the expression vector can depend on such factors as the choice of the host cell to be transformed, the level of expression of polypeptide desired, and the like. The expression vectors of the invention can be introduced into host cells to thereby produce proteins or peptides, including fusion proteins or peptides, encoded by nucleic acids as described herein (e.g., HNMDA-1 polypeptides, mutant forms of HNMDA-1 polypeptides, fusion proteins, and the like).

[1920] Accordingly, an exemplary embodiment provides a method for producing a polypeptide, preferably an HNMDA-1 polypeptide, by culturing in a suitable medium a host cell of the invention (e.g., a mammalian host cell such as a non-human mammalian cell) containing a recombinant expression vector, such that the polypeptide is produced.

[1921] The recombinant expression vectors of the invention can be designed for expression of HNMDA-1 polypeptides in prokaryotic or eukaryotic cells. For example, HNMDA-1 polypeptides can be expressed in bacterial cells such as E. coli, insect cells (using baculovirus expression vectors) yeast cells or mammalian cells. Suitable host cells are discussed further in Goeddel, Gene Expression Technology: Methods in Enzymology 185, Academic Press, San Diego, Calif. (1990). Alternatively, the recombinant expression vector can be transcribed and translated in vitro, for example using T7 promoter regulatory sequences and T7 polymerase.

[1922] Expression of proteins in prokaryotes is most often carried out in E. coli with vectors containing constitutive or inducible promoters directing the expression of either fusion or non-fusion proteins. Fusion vectors add a number of amino acids to a protein encoded therein, usually to the amino terminus of the recombinant protein. Such fusion vectors typically serve three purposes: 1) to increase expression of recombinant protein; 2) to increase the solubility of the recombinant protein; and 3) to aid in the purification of the recombinant protein by acting as a ligand in affinity purification. Often, in fusion expression vectors, a proteolytic cleavage site is introduced at the junction of the fusion moiety and the recombinant protein to enable separation of the recombinant protein from the fusion moiety subsequent to purification of the fusion protein. Such enzymes, and their cognate recognition sequences, include Factor Xa, thrombin and enterokinase. Typical fusion expression vectors include pGEX (Pharmacia Biotech Inc; Smith, D. B. and Johnson, K. S. (1988) Gene 67:31-40), pMAL (New England Biolabs, Beverly, Mass.) and pRIT5 (Pharmacia, Piscataway, N.J.) which fuse glutathione S-transferase (GST), maltose E binding protein, or protein A, respectively, to the target recombinant protein.

[1923] Purified fusion proteins can be utilized in HNMDA-1 activity assays, (e.g., direct assays or competitive assays described in detail below), or to generate antibodies specific for HNMDA-1 polypeptides, for example. In a preferred embodiment, an HNMDA-1 fusion protein expressed in a retroviral expression vector of the present invention can be utilized to infect bone marrow cells which are subsequently transplanted into irradiated recipients. The pathology of the subject recipient is then examined after sufficient time has passed (e.g., six (6) weeks).

[1924] Examples of suitable inducible non-fusion E. coli expression vectors include pTrc (Amann et al., (1988) Gene 69:301-315) and pET 11d (Studier et al., Gene Expression Technology: Methods in Enzymology 185, Academic Press, San Diego, Calif. (1990) 60-89). Target gene expression from the pTrc vector relies on host RNA polymerase transcription from a hybrid trp-lac fusion promoter. Target gene expression from the pET 11d vector relies on transcription from a T7 gn10-lac fusion promoter mediated by a coexpressed viral RNA polymerase (T7 gn1). This viral polymerase is supplied by host strains BL21(DE3) or HMS174(DE3) from a resident prophage harboring a T7 gn1 gene under the transcriptional control of the lacUV 5 promoter.

[1925] One strategy to maximize recombinant protein expression in E. coli is to express the protein in a host bacteria with an impaired capacity to proteolytically cleave the recombinant protein (Gottesman, S., Gene Expression Technology: Methods in Enzymology 185, Academic Press, San Diego, Calif. (1990) 119-128). Another strategy is to alter the nucleic acid sequence of the nucleic acid to be inserted into an expression vector so that the individual codons for each amino acid are those preferentially utilized in E. coli (Wada et al., (1992) Nucleic Acids Res. 20:2111-2118). Such alteration of nucleic acid sequences of the invention can be carried out by standard DNA synthesis techniques.

[1926] In another embodiment, the HNMDA-1 expression vector is a yeast expression vector. Examples of vectors for expression in yeast S. cerevisiae include pYepSec1 (Baldari, et al., (1987) EMBO J. 6:229-234), pMFa (Kurjan and Herskowitz, (1982) Cell 30:933-943), pJRY88 (Schultz et al., (1987) Gene 54:113-123), pYES2 (Invitrogen Corporation, San Diego, Calif.), and picZ (Invitrogen Corporation, San Diego, Calif.).

[1927] Alternatively, HNMDA-1 polypeptides can be expressed in insect cells using baculovirus expression vectors. Baculovirus vectors available for expression of proteins in cultured insect cells (e.g., Sf 9 cells) include the pAc series (Smith et al. (1983) Mol. Cell Biol. 3:2156-2165) and the pVL series (Lucklow and Summers (1989) Virology 170:31-39).

[1928] In yet another embodiment, a nucleic acid of the invention is expressed in mammalian cells using a mammalian expression vector. Examples of mammalian expression vectors include pCDM8 (Seed, B. (1987) Nature 329:840) and pMT2PC (Kaufman et al. (1987) EMBO J. 6:187-195). When used in mammalian cells, the expression vector's control functions are often provided by viral regulatory elements. For example, commonly used promoters are derived from polyoma, Adenovirus 2, cytomegalovirus and Simian Virus 40. For other suitable expression systems for both prokaryotic and eukaryotic cells see chapters 16 and 17 of Sambrook, J., Fritsh, E. F., and Maniatis, T. Molecular Cloning: A Laboratory Manual. 2nd, ed., Cold Spring Harbor Laboratory, Cold Spring Harbor Laboratory Press, Cold Spring Harbor, N.Y., 1989.

[1929] In another embodiment, the recombinant mammalian expression vector is capable of directing expression of the nucleic acid preferentially in a particular cell type (e.g., tissue-specific regulatory elements are used to express the nucleic acid). Tissue-specific regulatory elements are known in the art. Non-limiting examples of suitable tissue-specific promoters include the albumin promoter (liver-specific; Pinkert et al. (1987) Genes Dev. 1:268-277), lymphoid-specific promoters (Calame and Eaton (1988) Adv. Immunol. 43:235-275), in particular promoters of T cell receptors (Winoto and Baltimore (1989) EMBO J. 8:729-733) and immunoglobulins (Banerji et al. (1983) Cell 33:729-740; Queen and Baltimore (1983) Cell 33:741-748), neuron-specific promoters (e.g., the neurofilament promoter; Byrne and Ruddle (1989) Proc. Natl. Acad. Sci. USA 86:5473-5477), pancreas-specific promoters (Edlund et al. (1985) Science 230:912-916), and mammary gland-specific promoters (e.g., milk whey promoter; U.S. Pat. No. 4,873,316 and European Application Publication No. 264,166). Developmentally-regulated promoters are also encompassed, for example the murine hox promoters (Kessel and Gruss (1990) Science 249:374-379) and the α-fetoprotein promoter (Campes and Tilghman (1989) Genes Dev. 3:537-546).

[1930] The invention further provides a recombinant expression vector comprising a DNA molecule of the invention cloned into the expression vector in an antisense orientation. That is, the DNA molecule is operatively linked to a regulatory sequence in a manner which allows for expression (by transcription of the DNA molecule) of an RNA molecule which is antisense to HNMDA-1 mRNA. Regulatory sequences operatively linked to a nucleic acid cloned in the antisense orientation can be chosen which direct the continuous expression of the antisense RNA molecule in a variety of cell types, for instance viral promoters and/or enhancers, or regulatory sequences can be chosen which direct constitutive, tissue specific or cell type specific expression of antisense RNA. The antisense expression vector can be in the form of a recombinant plasmid, phagemid or attenuated virus in which antisense nucleic acids are produced under the control of a high efficiency regulatory region, the activity of which can be determined by the cell type into which the vector is introduced. For a discussion of the regulation of gene expression using antisense genes see Weintraub, H. et al., Antisense RNA as a molecular tool for genetic analysis, Reviews—Trends in Genetics, Vol. 1(1) 1986.

[1931] Another aspect of the invention pertains to host cells into which an HNMDA-1 nucleic acid molecule of the invention is introduced, e.g., an HNMDA-1 nucleic acid molecule within a vector (e.g., a recombinant expression vector) or an HNMDA-1 nucleic acid molecule containing sequences which allow it to homologously recombine into a specific site of the host cell's genome. The terms “host cell” and “recombinant host cell” are used interchangeably herein. It is understood that such terms refer not only to the particular subject cell but to the progeny or potential progeny of such a cell. Because certain modifications may occur in succeeding generations due to either mutation or environmental influences, such progeny may not, in fact, be identical to the parent cell, but are still included within the scope of the term as used herein.

[1932] A host cell can be any prokaryotic or eukaryotic cell. For example, an HNMDA-1 polypeptide can be expressed in bacterial cells such as E. coli, insect cells, yeast or mammalian cells (such as Chinese hamster ovary cells (CHO) or COS cells). Other suitable host cells are known to those skilled in the art.

[1933] Vector DNA can be introduced into prokaryotic or eukaryotic cells via conventional transformation or transfection techniques. As used herein, the terms “transformation” and “transfection” are intended to refer to a variety of art-recognized techniques for introducing foreign nucleic acid (e.g., DNA) into a host cell, including calcium phosphate or calcium chloride co-precipitation, DEAE-dextran-mediated transfection, lipofection, or electroporation. Suitable methods for transforming or transfecting host cells can be found in Sambrook, et al. (Molecular Cloning: A Laboratory Manual. 2nd, ed., Cold Spring Harbor Laboratory, Cold Spring Harbor Laboratory Press, Cold Spring Harbor, N.Y., 1989), and other laboratory manuals.

[1934] For stable transfection of mammalian cells, it is known that, depending upon the expression vector and transfection technique used, only a small fraction of cells may integrate the foreign DNA into their genome. In order to identify and select these integrants, a gene that encodes a selectable marker (e.g., resistance to antibiotics) is generally introduced into the host cells along with the gene of interest. Preferred selectable markers include those which confer resistance to drugs, such as G418, hygromycin and methotrexate. Nucleic acid encoding a selectable marker can be introduced into a host cell on the same vector as that encoding an HNMDA-1 polypeptide or can be introduced on a separate vector. Cells stably transfected with the introduced nucleic acid can be identified by drug selection (e.g., cells that have incorporated the selectable marker gene will survive, while the other cells die).

[1935] A host cell of the invention, such as a prokaryotic or eukaryotic host cell in culture, can be used to produce (i.e., express) an HNMDA-1 polypeptide. Accordingly, the invention further provides methods for producing an HNMDA-1 polypeptide using the host cells of the invention. In one embodiment, the method comprises culturing the host cell of the invention (into which a recombinant expression vector encoding an HNMDA-1 polypeptide has been introduced) in a suitable medium such that an HNMDA-1 polypeptide is produced. In another embodiment, the method further comprises isolating an HNMDA-1 polypeptide from the medium or the host cell.

[1936] The host cells of the invention can also be used to produce non-human transgenic animals. For example, in one embodiment, a host cell of the invention is a fertilized oocyte or an embryonic stem cell into which HNMDA-1-coding sequences have been introduced. Such host cells can then be used to create non-human transgenic animals in which exogenous HNMDA-1 sequences have been introduced into their genome or homologous recombinant animals in which endogenous HNMDA-1 sequences have been altered. Such animals are useful for studying the function and/or activity of an HNMDA-1 and for identifying and/or evaluating modulators of HNMDA-1 activity. As used herein, a “transgenic animal” is a non-human animal, preferably a mammal, more preferably a rodent such as a rat or mouse, in which one or more of the cells of the animal includes a transgene. Other examples of transgenic animals include non-human primates, sheep, dogs, cows, goats, chickens, amphibians, and the like. A transgene is exogenous DNA which is integrated into the genome of a cell from which a transgenic animal develops and which remains in the genome of the mature animal, thereby directing the expression of an encoded gene product in one or more cell types or tissues of the transgenic animal. As used herein, a “homologous recombinant animal” is a non-human animal, preferably a mammal, more preferably a mouse, in which an endogenous HNMDA-1 gene has been altered by homologous recombination between the endogenous gene and an exogenous DNA molecule introduced into a cell of the animal, e.g., an embryonic cell of the animal, prior to development of the animal.

[1937] A transgenic animal of the invention can be created by introducing an HNMDA-1-encoding nucleic acid into the male pronuclei of a fertilized oocyte, e.g., by microinjection, retroviral infection, and allowing the oocyte to develop in a pseudopregnant female foster animal. The HNMDA-1 cDNA sequence of SEQ ID NO:37 can be introduced as a transgene into the genome of a non-human animal. Alternatively, a nonhuman homologue of a HNMDA-1 gene, such as a mouse or rat HNMDA-1 gene, can be used as a transgene. Alternatively, an HNMDA-1 gene homologue, such as another HNMDA-1 family member, can be isolated based on hybridization to the HNMDA-1 cDNA sequences of SEQ ID NO:37 or 39, or the DNA insert of the plasmid deposited with ATCC as Accession Number ______ (described further in subsection I above) and used as a transgene. Intronic sequences and polyadenylation signals can also be included in the transgene to increase the efficiency of expression of the transgene. A tissue-specific regulatory sequence(s) can be operably linked to an HNMDA-1 transgene to direct expression of an HNMDA-1 polypeptide to particular cells. Methods for generating transgenic animals via embryo manipulation and microinjection, particularly animals such as mice, have become conventional in the art and are described, for example, in U.S. Pat. Nos. 4,736,866 and 4,870,009, both by Leder et al., U.S. Pat. No. 4,873,191 by Wagner et al. and in Hogan, B., Manipulating the Mouse Embryo, (Cold Spring Harbor Laboratory Press, Cold Spring Harbor, N.Y., 1986). Similar methods are used for production of other transgenic animals. A transgenic founder animal can be identified based upon the presence of an HNMDA-1 transgene in its genome and/or expression of HNMDA-1 mRNA in tissues or cells of the animals. A transgenic founder animal can then be used to breed additional animals carrying the transgene. Moreover, transgenic animals carrying a transgene encoding an HNMDA-1 polypeptide can further be bred to other transgenic animals carrying other transgenes.

[1938] To create a homologous recombinant animal, a vector is prepared which contains at least a portion of an HNMDA-1 gene into which a deletion, addition or substitution has been introduced to thereby alter, e.g, functionally disrupt, the HNMDA-1 gene. The HNMDA-1 gene can be a human gene (e.g., the cDNA of SEQ ID NO:39), but more preferably, is a non-human homologue of a HNMDA-1 gene (e.g., a cDNA isolated by stringent hybridization with the nucleotide sequence of SEQ ID NO:37). For example, a mouse HNMDA-1 gene can be used to construct a homologous recombination nucleic acid molecule, e.g., a vector, suitable for altering an endogenous HNMDA-1 gene in the mouse genome. In a preferred embodiment, the homologous recombination nucleic acid molecule is designed such that, upon homologous recombination, the endogenous HNMDA-1 gene is functionally disrupted (i.e., no longer encodes a functional protein; also referred to as a “knock out” vector). Alternatively, the homologous recombination nucleic acid molecule can be designed such that, upon homologous recombination, the endogenous HNMDA-1 gene is mutated or otherwise altered but still encodes functional polypeptide (e.g., the upstream regulatory region can be altered to thereby alter the expression of the endogenous HNMDA-1 polypeptide). In the homologous recombination nucleic acid molecule, the altered portion of the HNMDA-1 gene is flanked at its 5′ and 3′ ends by additional nucleic acid sequence of the HNMDA-1 gene to allow for homologous recombination to occur between the exogenous HNMDA-1 gene carried by the homologous recombination nucleic acid molecule and an endogenous HNMDA-1 gene in a cell, e.g., an embryonic stem cell. The additional flanking HNMDA-1 nucleic acid sequence is of sufficient length for successful homologous recombination with the endogenous gene. Typically, several kilobases of flanking DNA (both at the 5′ and 3′ ends) are included in the homologous recombination nucleic acid molecule (see, e.g., Thomas, K. R. and Capecchi, M. R. (1987) Cell 51:503 for a description of homologous recombination vectors). The homologous recombination nucleic acid molecule is introduced into a cell, e.g., an embryonic stem cell line (e.g., by electroporation) and cells in which the introduced HNMDA-1 gene has homologously recombined with the endogenous HNMDA-1 gene are selected (see e.g., Li, E. et al. (1992) Cell 69:915). The selected cells can then injected into a blastocyst of an animal (e.g., a mouse) to form aggregation chimeras (see e.g., Bradley, A. in Teratocarcinomas and Embryonic Stem Cells: A Practical Approach, E. J. Robertson, ed. (IRL, Oxford, 1987) pp. 113-152). A chimeric embryo can then be implanted into a suitable pseudopregnant female foster animal and the embryo brought to term. Progeny harboring the homologously recombined DNA in their germ cells can be used to breed animals in which all cells of the animal contain the homologously recombined DNA by germline transmission of the transgene. Methods for constructing homologous recombination nucleic acid molecules, e.g., vectors, or homologous recombinant animals are described further in Bradley, A. (1991) Current Opinion in Biotechnology 2:823-829 and in PCT International Publication Nos.: WO 90/11354 by Le Mouellec et al.; WO 91/01140 by Smithies et al; WO 92/0968 by Zijlstra et al.; and WO 93/04169 by Berns et al.

[1939] In another embodiment, transgenic non-human animals can be produced which contain selected systems which allow for regulated expression of the transgene. One example of such a system is the cre/loxP recombinase system of bacteriophage P1. For a description of the cre/loxP recombinase system, see, e.g., Lakso et al. (1992) Proc. Natl. Acad. Sci. USA 89:6232-6236. Another example of a recombinase system is the FLP recombinase system of Saccharomyces cerevisiae (O'Gorman et al. (1991) Science 251:1351-1355. If a cre/loxP recombinase system is used to regulate expression of the transgene, animals containing transgenes encoding both the Cre recombinase and a selected protein are required. Such animals can be provided through the construction of “double” transgenic animals, e.g., by mating two transgenic animals, one containing a transgene encoding a selected protein and the other containing a transgene encoding a recombinase.

[1940] Clones of the non-human transgenic animals described herein can also be produced according to the methods described in Wilmut, I. et al. (1997) Nature 385:810-813 and PCT International Publication Nos. WO 97/07668 and WO 97/07669. In brief, a cell, e.g., a somatic cell, from the transgenic animal can be isolated and induced to exit the growth cycle and enter G_{O} phase. The quiescent cell can then be fused, e.g., through the use of electrical pulses, to an enucleated oocyte from an animal of the same species from which the quiescent cell is isolated. The reconstructed oocyte is then cultured such that it develops to morula or blastocyte and then transferred to pseudopregnant female foster animal. The offspring borne of this female foster animal will be a clone of the animal from which the cell, e.g., the somatic cell, is isolated.

[1941] IV. Pharmaceutical Compositions

[1942] The HNMDA-1 nucleic acid molecules, fragments of HNMDA-1 polypeptides, and anti-HNMDA-1 antibodies (also referred to herein as “active compounds”) of the invention can be incorporated into pharmaceutical compositions suitable for administration. Such compositions typically comprise the nucleic acid molecule, polypeptide, or antibody and a pharmaceutically acceptable carrier. As used herein the language “pharmaceutically acceptable carrier” is intended to include any and all solvents, dispersion media, coatings, antibacterial and antifungal agents, isotonic and absorption delaying agents, and the like, compatible with pharmaceutical administration. The use of such media and agents for pharmaceutically active substances is well known in the art. Except insofar as any conventional media or agent is incompatible with the active compound, use thereof in the compositions is contemplated. Supplementary active compounds can also be incorporated into the compositions.

[1943] A pharmaceutical composition of the invention is formulated to be compatible with its intended route of administration. Examples of routes of administration include parenteral, e.g., intravenous, intradermal, subcutaneous, oral (e.g., inhalation), transdermal (topical), transmucosal, and rectal administration. Solutions or suspensions used for parenteral, intradermal, or subcutaneous application can include the following components: a sterile diluent such as water for injection, saline solution, fixed oils, polyethylene glycols, glycerine, propylene glycol or other synthetic solvents; antibacterial agents such as benzyl alcohol or methyl parabens; antioxidants such as ascorbic acid or sodium bisulfite; chelating agents such as ethylenediaminetetraacetic acid; buffers such as acetates, citrates or phosphates and agents for the adjustment of tonicity such as sodium chloride or dextrose. pH can be adjusted with acids or bases, such as hydrochloric acid or sodium hydroxide. The parenteral preparation can be enclosed in ampoules, disposable syringes or multiple dose vials made of glass or plastic.

[1944] Pharmaceutical compositions suitable for injectable use include sterile aqueous solutions (where water soluble) or dispersions and sterile powders for the extemporaneous preparation of sterile injectable solutions or dispersion. For intravenous administration, suitable carriers include physiological saline, bacteriostatic water, Cremophor EL™ (BASF, Parsippany, N.J.) or phosphate buffered saline (PBS). In all cases, the composition must be sterile and should be fluid to the extent that easy syringeability exists. It must be stable under the conditions of manufacture and storage and must be preserved against the contaminating action of microorganisms such as bacteria and fungi. The carrier can be a solvent or dispersion medium containing, for example, water, ethanol, polyol (for example, glycerol, propylene glycol, and liquid polyetheylene glycol, and the like), and suitable mixtures thereof. The proper fluidity can be maintained, for example, by the use of a coating such as lecithin, by the maintenance of the required particle size in the case of dispersion and by the use of surfactants. Prevention of the action of microorganisms can be achieved by various antibacterial and antifungal agents, for example, parabens, chlorobutanol, phenol, ascorbic acid, thimerosal, and the like. In many cases, it will be preferable to include isotonic agents, for example, sugars, polyalcohols such as manitol, sorbitol, sodium chloride in the composition. Prolonged absorption of the injectable compositions can be brought about by including in the composition an agent which delays absorption, for example, aluminum monostearate and gelatin.

[1945] Sterile injectable solutions can be prepared by incorporating the active compound (e.g., a fragment of an HNMDA-1 polypeptide or an anti-HNMDA-1 antibody) in the required amount in an appropriate solvent with one or a combination of ingredients enumerated above, as required, followed by filtered sterilization. Generally, dispersions are prepared by incorporating the active compound into a sterile vehicle which contains a basic dispersion medium and the required other ingredients from those enumerated above. In the case of sterile powders for the preparation of sterile injectable solutions, the preferred methods of preparation are vacuum drying and freeze-drying which yields a powder of the active ingredient plus any additional desired ingredient from a previously sterile-filtered solution thereof.

[1946] Oral compositions generally include an inert diluent or an edible carrier. They can be enclosed in gelatin capsules or compressed into tablets. For the purpose of oral therapeutic administration, the active compound can be incorporated with excipients and used in the form of tablets, troches, or capsules. Oral compositions can also be prepared using a fluid carrier for use as a mouthwash, wherein the compound in the fluid carrier is applied orally and swished and expectorated or swallowed. Pharmaceutically compatible binding agents, and/or adjuvant materials can be included as part of the composition. The tablets, pills, capsules, troches and the like can contain any of the following ingredients, or compounds of a similar nature: a binder such as microcrystalline cellulose, gum tragacanth or gelatin; an excipient such as starch or lactose, a disintegrating agent such as alginic acid, Primogel, or corn starch; a lubricant such as magnesium stearate or Sterotes; a glidant such as colloidal silicon dioxide; a sweetening agent such as sucrose or saccharin; or a flavoring agent such as peppermint, methyl salicylate, or orange flavoring.

[1947] For administration by inhalation, the compounds are delivered in the form of an aerosol spray from pressured container or dispenser which contains a suitable propellant, e.g., a gas such as carbon dioxide, or a nebulizer.

[1948] Systemic administration can also be by transmucosal or transdermal means. For transmucosal or transdermal administration, penetrants appropriate to the barrier to be permeated are used in the formulation. Such penetrants are generally known in the art, and include, for example, for transmucosal administration, detergents, bile salts, and fusidic acid derivatives. Transmucosal administration can be accomplished through the use of nasal sprays or suppositories. For transdermal administration, the active compounds are formulated into ointments, salves, gels, or creams as generally known in the art.

[1949] The compounds can also be prepared in the form of suppositories (e.g., with conventional suppository bases such as cocoa butter and other glycerides) or retention enemas for rectal delivery.

[1950] In one embodiment, the active compounds are prepared with carriers that will protect the compound against rapid elimination from the body, such as a controlled release formulation, including implants and microencapsulated delivery systems. Biodegradable, biocompatible polymers can be used, such as ethylene vinyl acetate, polyanhydrides, polyglycolic acid, collagen, polyorthoesters, and polylactic acid. Methods for preparation of such formulations will be apparent to those skilled in the art. The materials can also be obtained commercially from Alza Corporation and Nova Pharmaceuticals, Inc. Liposomal suspensions (including liposomes targeted to infected cells with monoclonal antibodies to viral antigens) can also be used as pharmaceutically acceptable carriers. These can be prepared according to methods known to those skilled in the art, for example, as described in U.S. Pat. No. 4,522,811.

[1951] It is especially advantageous to formulate oral or parenteral compositions in dosage unit form for ease of administration and uniformity of dosage. Dosage unit form as used herein refers to physically discrete units suited as unitary dosages for the subject to be treated; each unit containing a predetermined quantity of active compound calculated to produce the desired therapeutic effect in association with the required pharmaceutical carrier. The specification for the dosage unit forms of the invention are dictated by and directly dependent on the unique characteristics of the active compound and the particular therapeutic effect to be achieved, and the limitations inherent in the art of compounding such an active compound for the treatment of individuals.

[1952] Toxicity and therapeutic efficacy of such compounds can be determined by standard pharmaceutical procedures in cell cultures or experimental animals, e.g., for determining the LD50 (the dose lethal to 50% of the population) and the ED50 (the dose therapeutically effective in 50% of the population). The dose ratio between toxic and therapeutic effects is the therapeutic index and it can be expressed as the ratio LD50/ED50. Compounds which exhibit large therapeutic indices are preferred. While compounds that exhibit toxic side effects may be used, care should be taken to design a delivery system that targets such compounds to the site of affected tissue in order to minimize potential damage to uninfected cells and, thereby, reduce side effects.

[1953] The data obtained from the cell culture assays and animal studies can be used in formulating a range of dosage for use in humans. The dosage of such compounds lies preferably within a range of circulating concentrations that include the ED50 with little or no toxicity. The dosage may vary within this range depending upon the dosage form employed and the route of administration utilized. For any compound used in the method of the invention, the therapeutically effective dose can be estimated initially from cell culture assays. A dose may be formulated in animal models to achieve a circulating plasma concentration range that includes the IC50 (i.e., the concentration of the test compound which achieves a half-maximal inhibition of symptoms) as determined in cell culture. Such information can be used to more accurately determine useful doses in humans. Levels in plasma may be measured, for example, by high performance liquid chromatography.

[1954] As defined herein, a therapeutically effective amount of polypeptide (i.e., an effective dosage) ranges from about 0.001 to 30 mg/kg body weight, preferably about 0.01 to 25 mg/kg body weight, more preferably about 0.1 to 20 mg/kg body weight, and even more preferably about 1 to 10 mg/kg, 2 to 9 mg/kg, 3 to 8 mg/kg, 4 to 7 mg/kg, or 5 to 6 mg/kg body weight. The skilled artisan will appreciate that certain factors may influence the dosage required to effectively treat a subject, including but not limited to the severity of the disease or disorder, previous treatments, the general health and/or age of the subject, and other diseases present. Moreover, treatment of a subject with a therapeutically effective amount of a polypeptide or antibody can include a single treatment or, preferably, can include a series of treatments.

[1955] In a preferred example, a subject is treated with antibody or polypeptide in the range of between about 0.1 to 20 mg/kg body weight, one time per week for between about 1 to 10 weeks, preferably between 2 to 8 weeks, more preferably between about 3 to 7 weeks, and even more preferably for about 4, 5, or 6 weeks. It will also be appreciated that the effective dosage of antibody or polypeptide used for treatment may increase or decrease over the course of a particular treatment. Changes in dosage may result and become apparent from the results of diagnostic assays as described herein.

[1956] The present invention encompasses agents which modulate expression or activity. An agent may, for example, be a small molecule. For example, such small molecules include, but are not limited to, peptides, peptidomimetics, amino acids, amino acid analogs, polynucleotides, polynucleotide analogs, nucleotides, nucleotide analogs, organic or inorganic compounds (i.e.,. including heteroorganic and organometallic compounds) having a molecular weight less than about 10,000 grams per mole, organic or inorganic compounds having a molecular weight less than about 5,000 grams per mole, organic or inorganic compounds having a molecular weight less than about 1,000 grams per mole, organic or inorganic compounds having a molecular weight less than about 500 grams per mole, and salts, esters, and other pharmaceutically acceptable forms of such compounds. It is understood that appropriate doses of small molecule agents depends upon a number of factors within the ken of the ordinarily skilled physician, veterinarian, or researcher. The dose(s) of the small molecule will vary, for example, depending upon the identity, size, and condition of the subject or sample being treated, further depending upon the route by which the composition is to be administered, if applicable, and the effect which the practitioner desires the small molecule to have upon the nucleic acid or polypeptide of the invention.

[1957] Exemplary doses include milligram or microgram amounts of the small molecule per kilogram of subject or sample weight (e.g., about 1 microgram per kilogram to about 500 milligrams per kilogram, about 100 micrograms per kilogram to about 5 milligrams per kilogram, or about 1 microgram per kilogram to about 50 micrograms per kilogram. It is furthermore understood that appropriate doses of a small molecule depend upon the potency of the small molecule with respect to the expression or activity to be modulated. Such appropriate doses may be determined using the assays described herein. When one or more of these small molecules is to be administered to an animal (e.g., a human) in order to modulate expression or activity of a polypeptide or nucleic acid of the invention, a physician, veterinarian, or researcher may, for example, prescribe a relatively low dose at first, subsequently increasing the dose until an appropriate response is obtained. In addition, it is understood that the specific dose level for any particular animal subject will depend upon a variety of factors including the activity of the specific compound employed, the age, body weight, general health, gender, and diet of the subject, the time of administration, the route of administration, the rate of excretion, any drug combination, and the degree of expression or activity to be modulated.

[1958] Further, an antibody (or fragment thereof) may be conjugated to a therapeutic moiety such as a cytotoxin, a therapeutic agent or a radioactive metal ion. A cytotoxin or cytotoxic agent includes any agent that is detrimental to cells. Examples include taxol, cytochalasin B, gramicidin D, ethidium bromide, emetine, mitomycin, etoposide, tenoposide, vincristine, vinblastine, colchicin, doxorubicin, daunorubicin, dihydroxy anthracin dione, mitoxantrone, mithramycin, actinomycin D, 1-dehydrotestosterone, glucocorticoids, procaine, tetracaine, lidocaine, propranolol, and puromycin and analogs or homologues thereof. Therapeutic agents include, but are not limited to, antimetabolites (e.g., methotrexate, 6-mercaptopurine, 6-thioguanine, cytarabine, 5-fluorouracil decarbazine), alkylating agents (e.g., mechlorethamine, thioepa chlorambucil, melphalan, carmustine (BSNU) and lomustine (CCNU), cyclothosphamide, busulfan, dibromomannitol, streptozotocin, mitomycin C, and cis-dichlorodiamine platinum (II) (DDP) cisplatin), anthracyclines (e.g., daunorubicin (formerly daunomycin) and doxorubicin), antibiotics (e.g., dactinomycin (formerly actinomycin), bleomycin, mithramycin, and anthramycin (AMC)), and anti-mitotic agents (e.g., vincristine and vinblastine).

[1959] The conjugates of the invention can be used for modifying a given biological response, the drug moiety is not to be construed as limited to classical chemical therapeutic agents. For example, the drug moiety may be a protein or polypeptide possessing a desired biological activity. Such proteins may include, for example, a toxin such as abrin, ricin A, pseudomonas exotoxin, or diphtheria toxin; a protein such as tumor necrosis factor, alpha-interferon, beta-interferon, nerve growth factor, platelet derived growth factor, tissue plasminogen activator; or, biological response modifiers such as, for example, lymphokines, interleukin-1 (“IL-1”), interleukin-2 (“IL-2”), interleukin-6 (“IL-6”), granulocyte macrophage colony stimulating factor (“GM-CSF”), granulocyte colony stimulating factor (“G-CSF”), or other growth factors.

[1960] Techniques for conjugating such therapeutic moiety to antibodies are well known, see, e.g., Arnon et al., “Monoclonal Antibodies For Immunotargeting Of Drugs In Cancer Therapy”, in Monoclonal Antibodies And Cancer Therapy, Reisfeld et al. (eds.), pp. 243-56 (Alan R. Liss, Inc. 1985); Hellstrom et al., “Antibodies For Drug Delivery”, in Controlled Drug Delivery (2nd Ed.), Robinson et al. (eds.), pp. 623-53 (Marcel Dekker, Inc. 1987); Thorpe, “Antibody Carriers Of Cytotoxic Agents In Cancer Therapy: A Review”, in Monoclonal Antibodies '84: Biological And Clinical Applications, Pinchera et al. (eds.), pp. 475-506 (1985); “Analysis, Results, And Future Prospective Of The Therapeutic Use Of Radiolabeled Antibody In Cancer Therapy”, in Monoclonal Antibodies For Cancer Detection And Therapy, Baldwin et al. (eds.), pp. 303-16 (Academic Press 1985), and Thorpe et al., “The Preparation And Cytotoxic Properties Of Antibody-Toxin Conjugates”, Immunol. Rev., 62:119-58 (1982). Alternatively, an antibody can be conjugated to a second antibody to form an antibody heteroconjugate as described by Segal in U.S. Pat. No. 4,676,980.

[1961] The nucleic acid molecules of the invention can be inserted into vectors and used as gene therapy vectors. Gene therapy vectors can be delivered to a subject by, for example, intravenous injection, local administration (see U.S. Pat. No. 5,328,470) or by stereotactic injection (see e.g., Chen et al. (1994) Proc. Natl. Acad. Sci. USA 91:3054-3057). The pharmaceutical preparation of the gene therapy vector can include the gene therapy vector in an acceptable diluent, or can comprise a slow release matrix in which the gene delivery vehicle is imbedded. Alternatively, where the complete gene delivery vector can be produced intact from recombinant cells, e.g., retroviral vectors, the pharmaceutical preparation can include one or more cells which produce the gene delivery system.

[1962] The pharmaceutical compositions can be included in a container, pack, or dispenser together with instructions for administration.

[1963] V. Uses and Methods of the Invention

[1964] The nucleic acid molecules, proteins, protein homologues, and antibodies described herein can be used in one or more of the following methods: a) screening assays; b) predictive medicine (e.g., diagnostic assays, prognostic assays, monitoring clinical trials, and pharmacogenetics); and c) methods of treatment (e.g., therapeutic and prophylactic). As described herein, an HNMDA-1 polypeptide of the invention has one or more of the following activities: (1) modulateCa²⁺ transport across a cell membrane, (2) modulate intracellular Ca²⁺ concentration, (3) bind a ligand, e.g., L-glutamate, and/or glycine, (4) influence long term synapse potentiation, (5) modulate synapse formation, e.g., synapse formation related to memory or learning, and/or (6) modulate synapse formation related to the formation of neural networks during development.

[1965] The isolated nucleic acid molecules of the invention can be used, for example, to express HNMDA-1 polypeptides (e.g., via a recombinant expression vector in a host cell in gene therapy applications), to detect HNMDA-1 mRNA (e.g., in a biological sample) or a genetic alteration in an HNMDA-1 gene, and to modulate HNMDA-1 activity, as described further below. The HNMDA-1 polypeptides can be used to treat disorders characterized by insufficient or excessive production of an HNMDA-1 substrate or production of HNMDA-1 inhibitors. In addition, the HNMDA-1 polypeptides can be used to screen for naturally occurring HNMDA-1 substrates, to screen for drugs or compounds which modulate HNMDA-1 activity, as well as to treat disorders characterized by insufficient or excessive production of HNMDA-1 polypeptide or production of HNMDA-1 polypeptide forms which have decreased, aberrant or unwanted activity compared to HNMDA-1 wild type polypeptide (e.g., glutamate-gated ion channel disorders). Moreover, the anti-HNMDA-1 antibodies of the invention can be used to detect and isolate HNMDA-1 polypeptides, to regulate the bioavailability of HNMDA-1 polypeptides, and modulate HNMDA-1 activity.

[1966] A. Screening Assays

[1967] The invention provides a method (also referred to herein as a “screening assay”) for identifying modulators, i.e., candidate or test compounds or agents (e.g., peptides, peptidomimetics, small molecules or other drugs) which bind to HNMDA-1 polypeptides, have a stimulatory or inhibitory effect on, for example, HNMDA-1 expression or HNMDA-1 activity, or have a stimulatory or inhibitory effect on, for example, the expression or activity of HNMDA-1 substrate.

[1968] In one embodiment, the invention provides assays for screening candidate or test compounds which are substrates of an HNMDA-1 polypeptide or polypeptide or biologically active portion thereof. In another embodiment, the invention provides assays for screening candidate or test compounds which bind to or modulate the activity of an HNMDA-1 polypeptide or polypeptide or biologically active portion thereof. The test compounds of the present invention can be obtained using any of the numerous approaches in combinatorial library methods known in the art, including: biological libraries; spatially addressable parallel solid phase or solution phase libraries; synthetic library methods requiring deconvolution; the ‘one-bead one-compound’ library method; and synthetic library methods using affinity chromatography selection. The biological library approach is limited to peptide libraries, while the other four approaches are applicable to peptide, non-peptide oligomer or small molecule libraries of compounds (Lam, K. S. (1997) Anticancer Drug Des. 12:145).

[1969] Examples of methods for the synthesis of molecular libraries can be found in the art, for example in: DeWitt et al. (1993) Proc. Natl. Acad. Sci. U.S.A. 90:6909; Erb et al. (1994) Proc. Natl. Acad. Sci. USA 91:11422; Zuckermann et al. (1994). J. Med. Chem. 37:2678; Cho et al. (1993) Science 261:1303; Carrell et al. (1994) Angew. Chem. Int. Ed. Engl. 33:2059; Carell et al. (1994) Angew. Chem. Int. Ed. Engl. 33:2061; and in Gallop et al. (1994) J. Med. Chem. 37:1233.

[1970] Libraries of compounds may be presented in solution (e.g., Houghten (1992) Biotechniques 13:412-421), or on beads (Lam (1991) Nature 354:82-84), chips (Fodor (1993) Nature 364:555-556), bacteria (Ladner U.S. Pat. No. 5,223,409), spores (Ladner U.S. Pat. No. '409), plasmids (Cull et al. (1992) Proc Natl Acad Sci USA 89:1865-1869) or on phage (Scott and Smith (1990) Science 249:386-390); (Devlin (1990) Science 249:404-406); (Cwirla et al. (1990) Proc. Natl. Acad. Sci. 87:6378-6382); (Felici (1991) J. Mol. Biol. 222:301-310); (Ladner supra.).

[1971] In one embodiment, an assay is a cell-based assay in which a cell which expresses an HNMDA-1 polypeptide or biologically active portion thereof is contacted with a test compound and the ability of the test compound to modulate HNMDA-1 activity is determined. Determining the ability of the test compound to modulate HNMDA-1 activity can be accomplished by monitoring, for example, intracellular or extracellular L-glutamate, glycine, or Ca²⁺ concentration. The cell, for example, can be of mammalian origin, e.g., a neural cell.

[1972] The ability of the test compound to modulate HNMDA-1 binding to a substrate or to bind to HNMDA-1 can also be determined. Determining the ability of the test compound to modulate HNMDA-1 binding to a substrate can be accomplished, for example, by coupling the HNMDA-1 substrate with a radioisotope or enzymatic label such that binding of the HNMDA-1 substrate to HNMDA-1 can be determined by detecting the labeled HNMDA-1 substrate in a complex. Alternatively, HNMDA-1 could be coupled with a radioisotope or enzymatic label to monitor the ability of a test compound to modulate HNMDA-1 binding to an HNMDA-1 substrate in a complex. Determining the ability of the test compound to bind HNMDA-1 can be accomplished, for example, by coupling the compound with a radioisotope or enzymatic label such that binding of the compound to HNMDA-1 can be determined by detecting the labeled HNMDA-1 compound in a complex. For example, compounds (e.g., HNMDA-1 substrates) can be labeled with ¹²⁵I, ³⁵S, ¹⁴C, or ³H, either directly or indirectly, and the radioisotope detected by direct counting of radioemission or by scintillation counting. Alternatively, compounds can be enzymatically labeled with, for example, horseradish peroxidase, alkaline phosphatase, or luciferase, and the enzymatic label detected by determination of conversion of an appropriate substrate to product.

[1973] It is also within the scope of this invention to determine the ability of a compound (e.g., an HNMDA-1 substrate) to interact with HNMDA-1 without the labeling of any of the interactants. For example, a microphysiometer can be used to detect the interaction of a compound with HNMDA-1 without the labeling of either the compound or the HNMDA-1. McConnell, H. M. et al. (1992) Science 257:1906-1912. As used herein, a “microphysiometer” (e.g., Cytosensor) is an analytical instrument that measures the rate at which a cell acidifies its environment using a light-addressable potentiometric sensor (LAPS). Changes in this acidification rate can be used as an indicator of the interaction between a compound and HNMDA-1.

[1974] In another embodiment, an assay is a cell-based assay comprising contacting a cell expressing an HNMDA-1 target molecule (e.g., an HNMDA-1 substrate) with a test compound and determining the ability of the test compound to modulate (e.g., stimulate or inhibit) the activity of the HNMDA-1 target molecule. Determining the ability of the test compound to modulate the activity of an HNMDA-1 target molecule can be accomplished, for example, by determining the ability of the HNMDA-1 polypeptide to bind to or interact with the HNMDA-1 target molecule.

[1975] Determining the ability of the HNMDA-1 polypeptide, or a biologically active fragment thereof, to bind to or interact with an HNMDA-1 target molecule can be accomplished by one of the methods described above for determining direct binding. In a preferred embodiment, determining the ability of the HNMDA-1 polypeptide to bind to or interact with an HNMDA-1 target molecule can be accomplished by determining the activity of the target molecule. For example, the activity of the target molecule can be determined by detecting induction of a cellular second messenger of the target (i.e., intracellular Ca²⁺, diacylglycerol, IP₃, and the like), detecting catalytic/enzymatic activity of the target using an appropriate substrate, detecting the induction of a reporter gene (comprising a target-responsive regulatory element operatively linked to a nucleic acid encoding a detectable marker, e.g., luciferase), or detecting a target-regulated cellular response.

[1976] In yet another embodiment, an assay of the present invention is a cell-free assay in which an HNMDA-1 polypeptide or biologically active portion thereof is contacted with a test compound and the ability of the test compound to bind to the HNMDA-1 polypeptide or biologically active portion thereof is determined. Preferred biologically active portions of the HNMDA-1 polypeptides to be used in assays of the present invention include fragments which participate in interactions with non-HNMDA-1 molecules, e.g., fragments with high surface probability scores (see, for example, FIG. 33). Binding of the test compound to the HNMDA-1 polypeptide can be determined either directly or indirectly as described above. In a preferred embodiment, the assay includes contacting the HNMDA-1 polypeptide or biologically active portion thereof with a known compound which binds HNMDA-1 to form an assay mixture, contacting the assay mixture with a test compound, and determining the ability of the test compound to interact with an HNMDA-1 polypeptide, wherein determining the ability of the test compound to interact with an HNMDA-1 polypeptide comprises determining the ability of the test compound to preferentially bind to HNMDA-1 or biologically active portion thereof as compared to the known compound.

[1977] In another embodiment, the assay is a cell-free assay in which an HNMDA-1 polypeptide or biologically active portion thereof is contacted with a test compound and the ability of the test compound to modulate (e.g., stimulate or inhibit) the activity of the HNMDA-1 polypeptide or biologically active portion thereof is determined. Determining the ability of the test compound to modulate the activity of an HNMDA-1 polypeptide can be accomplished, for example, by determining the ability of the HNMDA-1 polypeptide to bind to an HNMDA-1 target molecule by one of the methods described above for determining direct binding. Determining the ability of the HNMDA-1 polypeptide to bind to an HNMDA-1 target molecule can also be accomplished using a technology such as real-time Biomolecular Interaction Analysis (BIA). Sjolander, S. and Urbaniczky, C. (1991) Anal. Chem. 63:2338-2345 and Szabo et al. (1995) Curr. Opin. Struct. Biol. 5:699-705. As used herein, “BIA” is a technology for studying biospecific interactions in real time, without labeling any of the interactants (e.g., BIAcore). Changes in the optical phenomenon of surface plasmon resonance (SPR) can be used as an indication of real-time reactions between biological molecules.

[1978] In an alternative embodiment, determining the ability of the test compound to modulate the activity of an HNMDA-1 polypeptide can be accomplished by determining the ability of the HNMDA-1 polypeptide to further modulate the activity of a downstream effector of an HNMDA-1 target molecule. For example, the activity of the effector molecule on an appropriate target can be determined or the binding of the effector to an appropriate target can be determined as previously described.

[1979] In yet another embodiment, the cell-free assay involves contacting an HNMDA-1 polypeptide or biologically active portion thereof with a known compound which binds the HNMDA-1 polypeptide to form an assay mixture, contacting the assay mixture with a test compound, and determining the ability of the test compound to interact with the HNMDA-1 polypeptide, wherein determining the ability of the test compound to interact with the HNMDA-1 polypeptide comprises determining the ability of the HNMDA-1 polypeptide to preferentially bind to or modulate the activity of an HNMDA-1 target molecule.

[1980] In more than one embodiment of the above assay methods of the present invention, it may be desirable to immobilize either HNMDA-1 or its target molecule to facilitate separation of complexed from uncomplexed forms of one or both of the proteins, as well as to accommodate automation of the assay. Binding of a test compound to an HNMDA-1 polypeptide, or interaction of an HNMDA-1 polypeptide with a target molecule in the presence and absence of a candidate compound, can be accomplished in any vessel suitable for containing the reactants. Examples of such vessels include microtiter plates, test tubes, and micro-centrifuge tubes. In one embodiment, a fusion protein can be provided which adds a domain that allows one or both of the proteins to be bound to a matrix. For example, glutathione-S-transferase/HNMDA-1 fusion proteins or glutathione-S-transferase/target fusion proteins can be adsorbed onto glutathione sepharose beads (Sigma Chemical, St. Louis, Mo.) or glutathione derivatized micrometer plates, which are then combined with the test compound or the test compound and either the non-adsorbed target protein or HNMDA-1 polypeptide, and the mixture incubated under conditions conducive to complex formation (e.g., at physiological conditions for salt and pH). Following incubation, the beads or micrometer plate wells are washed to remove any unbound components, the matrix immobilized in the case of beads, complex determined either directly or indirectly, for example, as described above. Alternatively, the complexes can be dissociated from the matrix, and the level of HNMDA-1 binding or activity determined using standard techniques.

[1981] Other techniques for immobilizing proteins on matrices can also be used in the screening assays of the invention. For example, either an HNMDA-1 polypeptide or an HNMDA-1 target molecule can be immobilized utilizing conjugation of biotin and streptavidin. Biotinylated HNMDA-1 polypeptide or target molecules can be prepared from biotin-NHS (N-hydroxy-succinimide) using techniques known in the art (e.g., biotinylation kit, Pierce Chemicals, Rockford, Ill.), and immobilized in the wells of streptavidin-coated 96 well plates (Pierce Chemical). Alternatively, antibodies reactive with HNMDA-1 polypeptide or target molecules but which do not interfere with binding of the HNMDA-1 polypeptide to its target molecule can be derivatized to the wells of the plate, and unbound target or HNMDA-1 polypeptide trapped in the wells by antibody conjugation. Methods for detecting such complexes, in addition to those described above for the GST-immobilized complexes, include immunodetection of complexes using antibodies reactive with the HNMDA-1 polypeptide or target molecule, as well as enzyme-linked assays which rely on detecting an enzymatic activity associated with the HNMDA-1 polypeptide or target molecule.

[1982] In another embodiment, modulators of HNMDA-1 expression are identified in a method wherein a cell is contacted with a candidate compound and the expression of HNMDA-1 mRNA or polypeptide in the cell is determined. The level of expression of HNMDA-1 mRNA or polypeptide in the presence of the candidate compound is compared to the level of expression of HNMDA-1 mRNA or polypeptide in the absence of the candidate compound. The candidate compound can then be identified as a modulator of HNMDA-1 expression based on this comparison. For example, when expression of HNMDA-1 mRNA or polypeptide is greater (statistically significantly greater) in the presence of the candidate compound than in its absence, the candidate compound is identified as a stimulator of HNMDA-1 mRNA or polypeptide expression. Alternatively, when expression of HNMDA-1 mRNA or polypeptide is less (statistically significantly less) in the presence of the candidate compound than in its absence, the candidate compound is identified as an inhibitor of HNMDA-1 mRNA or polypeptide expression. The level of HNMDA-1 mRNA or polypeptide expression in the cells can be determined by methods described herein for detecting HNMDA-1 mRNA or polypeptide.

[1983] In yet another aspect of the invention, the HNMDA-1 polypeptides can be used as “bait proteins” in a two-hybrid assay or three-hybrid assay (see, e.g., U.S. Pat. No. 5,283,317; Zervos et al. (1993) Cell 72:223-232; Madura et al. (1993) J. Biol. Chem. 268:12046-12054; Bartel et al. (1993) Biotechniques 14:920-924; Iwabuchi et al. (1993) Oncogene 8:1693-1696; and Brent WO94/10300), to identify other proteins, which bind to or interact with HNMDA-1 (“HNMDA-1-binding proteins” or “HNMDA-1-bp”) and are involved in HNMDA-1 activity. Such HNMDA-1-binding proteins are also likely to be involved in the propagation of signals by the HNMDA-1 polypeptides or HNMDA-1 targets as, for example, downstream elements of an HNMDA-1-mediated signaling pathway. Alternatively, such HNMDA-1-binding proteins are likely to be HNMDA-1 inhibitors.

[1984] The two-hybrid system is based on the modular nature of most transcription factors, which consist of separable DNA-binding and activation domains. Briefly, the assay utilizes two different DNA constructs. In one construct, the gene that codes for an HNMDA-1 polypeptide is fused to a gene encoding the DNA binding domain of a known transcription factor (e.g., GAL-4). In the other construct, a DNA sequence, from a library of DNA sequences, that encodes an unidentified protein (“prey” or “sample”) is fused to a gene that codes for the activation domain of the known transcription factor. If the “bait” and the “prey” proteins are able to interact, in vivo, forming an HNMDA-1-dependent complex, the DNA-binding and activation domains of the transcription factor are brought into close proximity. This proximity allows transcription of a reporter gene (e.g., LacZ) which is operably linked to a transcriptional regulatory site responsive to the transcription factor. Expression of the reporter gene can be detected and cell colonies containing the functional transcription factor can be isolated and used to obtain the cloned gene which encodes the protein which interacts with the HNMDA-1 polypeptide.

[1985] In another aspect, the invention pertains to a combination of two or more of the assays described herein. For example, a modulating agent can be identified using a cell-based or a cell free assay, and the ability of the agent to modulate the activity of an HNMDA-1 polypeptide can be confirmed in vivo, e.g., in an animal such as an animal model for a learning or memory disorder.

[1986] This invention further pertains to novel agents identified by the above-described screening assays. Accordingly, it is within the scope of this invention to further use an agent identified as described herein in an appropriate animal model. For example, an agent identified as described herein (e.g., an HNMDA-1 modulating agent, an antisense HNMDA-1 nucleic acid molecule, an HNMDA-1-specific antibody, or an HNMDA-1-binding partner) can be used in an animal model to determine the efficacy, toxicity, or side effects of treatment with such an agent. Alternatively, an agent identified as described herein can be used in an animal model to determine the mechanism of action of such an agent. Furthermore, this invention pertains to uses of novel agents identified by the above-described screening assays for treatments as described herein.

[1987] B. Detection Assays

[1988] Portions or fragments of the cDNA sequences identified herein (and the corresponding complete gene sequences) can be used in numerous ways as polynucleotide reagents. For example, these sequences can be used to: (i) map their respective genes on a chromosome; and, thus, locate gene regions associated with genetic disease; (ii) identify an individual from a minute biological sample (tissue typing); and (iii) aid in forensic identification of a biological sample. These applications are described in the subsections below.

[1989] 1. Chromosome Mapping

[1990] Once the sequence (or a portion of the sequence) of a gene has been isolated, this sequence can be used to map the location of the gene on a chromosome. This process is called chromosome mapping. Accordingly, portions or fragments of the HNMDA-1 nucleotide sequences, described herein, can be used to map the location of the HNMDA-1 genes on a chromosome. The mapping of the HNMDA-1 sequences to chromosomes is an important first step in correlating these sequences with genes associated with disease.

[1991] Briefly, HNMDA-1 genes can be mapped to chromosomes by preparing PCR primers (preferably 15-25 bp in length) from the HNMDA-1 nucleotide sequences. Computer analysis of the HNMDA-1 sequences can be used to predict primers that do not span more than one exon in the genomic DNA, thus complicating the amplification process. These primers can then be used for PCR screening of somatic cell hybrids containing individual human chromosomes. Only those hybrids containing the human gene corresponding to the HNMDA-1 sequences will yield an amplified fragment.

[1992] Somatic cell hybrids are prepared by fusing somatic cells from different mammals (e.g., human and mouse cells). As hybrids of human and mouse cells grow and divide, they gradually lose human chromosomes in random order, but retain the mouse chromosomes. By using media in which mouse cells cannot grow, because they lack a particular enzyme, but human cells can, the one human chromosome that contains the gene encoding the needed enzyme, will be retained. By using various media, panels of hybrid cell lines can be established. Each cell line in a panel contains either a single human chromosome or a small number of human chromosomes, and a full set of mouse chromosomes, allowing easy mapping of individual genes to specific human chromosomes. (D'Eustachio P. et al. (1983) Science 220:919-924). Somatic cell hybrids containing only fragments of human chromosomes can also be produced by using human chromosomes with translocations and deletions.

[1993] PCR mapping of somatic cell hybrids is a rapid procedure for assigning a particular sequence to a particular chromosome. Three or more sequences can be assigned per day using a single thermal cycler. Using the HNMDA-1 nucleotide sequences to design oligonucleotide primers, sublocalization can be achieved with panels of fragments from specific chromosomes. Other mapping strategies which can similarly be used to map an HNMDA-1 sequence to its chromosome include in situ hybridization (described in Fan, Y. et al. (1990) Proc. Natl. Acad. Sci. USA, 87:6223-27), pre-screening with labeled flow-sorted chromosomes, and pre-selection by hybridization to chromosome specific cDNA libraries.

[1994] Fluorescence in situ hybridization (FISH) of a DNA sequence to a metaphase chromosomal spread can further be used to provide a precise chromosomal location in one step. Chromosome spreads can be made using cells whose division has been blocked in metaphase by a chemical such as colcemid that disrupts the mitotic spindle. The chromosomes can be treated briefly with trypsin, and then stained with Giemsa. A pattern of light and dark bands develops on each chromosome, so that the chromosomes can be identified individually. The FISH technique can be used with a DNA sequence as short as 500 or 600 bases. However, clones larger than 1,000 bases have a higher likelihood of binding to a unique chromosomal location with sufficient signal intensity for simple detection. Preferably 1,000 bases, and more preferably 2,000 bases will suffice to get good results at a reasonable amount of time. For a review of this technique, see Verma et al., Human Chromosomes: A Manual of Basic Techniques (Pergamon Press, New York 1988).

[1995] Reagents for chromosome mapping can be used individually to mark a single chromosome or a single site on that chromosome, or panels of reagents can be used for marking multiple sites and/or multiple chromosomes. Reagents corresponding to noncoding regions of the genes actually are preferred for mapping purposes. Coding sequences are more likely to be conserved within gene families, thus increasing the chance of cross hybridizations during chromosomal mapping.

[1996] Once a sequence has been mapped to a precise chromosomal location, the physical position of the sequence on the chromosome can be correlated with genetic map data. (Such data are found, for example, in V. McKusick, Mendelian Inheritance in Man, available on-line through Johns Hopkins University Welch Medical Library). The relationship between a gene and a disease, mapped to the same chromosomal region, can then be identified through linkage analysis (co-inheritance of physically adjacent genes), described in, for example, Egeland, J. et al. (1987) Nature, 325:783-787.

[1997] Moreover, differences in the DNA sequences between individuals affected and unaffected with a disease associated with the HNMDA-1 gene, can be determined. If a mutation is observed in some or all of the affected individuals but not in any unaffected individuals, then the mutation is likely to be the causative agent of the particular disease. Comparison of affected and unaffected individuals generally involves first looking for structural alterations in the chromosomes, such as deletions or translocations that are visible from chromosome spreads or detectable using PCR based on that DNA sequence. Ultimately, complete sequencing of genes from several individuals can be performed to confirm the presence of a mutation and to distinguish mutations from polymorphisms.

[1998] 2. Tissue Typing

[1999] The HNMDA-1 sequences of the present invention can also be used to identify individuals from minute biological samples. The United States military, for example, is considering the use of restriction fragment length polymorphism (RFLP) for identification of its personnel. In this technique, an individual's genomic DNA is digested with one or more restriction enzymes, and probed on a Southern blot to yield unique bands for identification. This method does not suffer from the current limitations of “Dog Tags” which can be lost, switched, or stolen, making positive identification difficult. The sequences of the present invention are useful as additional DNA markers for RFLP (described in U.S. Pat. No. 5,272,057).

[2000] Furthermore, the sequences of the present invention can be used to provide an alternative technique which determines the actual base-by-base DNA sequence of selected portions of an individual's genome. Thus, the HNMDA-1 nucleotide sequences described herein can be used to prepare two PCR primers from the 5′ and 3′ ends of the sequences. These primers can then be used to amplify an individual's DNA and subsequently sequence it.

[2001] Panels of corresponding DNA sequences from individuals, prepared in this manner, can provide unique individual identifications, as each individual will have a unique set of such DNA sequences due to allelic differences. The sequences of the present invention can be used to obtain such identification sequences from individuals and from tissue. The HNMDA-1 nucleotide sequences of the invention uniquely represent portions of the human genome. Allelic variation occurs to some degree in the coding regions of these sequences, and to a greater degree in the noncoding regions. It is estimated that allelic variation between individual humans occurs with a frequency of about once per each 500 bases. Each of the sequences described herein can, to some degree, be used as a standard against which DNA from an individual can be compared for identification purposes. Because greater numbers of polymorphisms occur in the noncoding regions, fewer sequences are necessary to differentiate individuals. The noncoding sequences of SEQ ID NO:37 can comfortably provide positive individual identification with a panel of perhaps 10 to 1,000 primers which each yield a noncoding amplified sequence of 100 bases. If predicted coding sequences, such as those in SEQ ID NO:39 are used, a more appropriate number of primers for positive individual identification would be 500-2,000.

[2002] If a panel of reagents from HNMDA-1 nucleotide sequences described herein is used to generate a unique identification database for an individual, those same reagents can later be used to identify tissue from that individual. Using the unique identification database, positive identification of the individual, living or dead, can be made from extremely small tissue samples.

[2003] 3. Use of HNMDA-1 Sequences in Forensic Biology

[2004] DNA-based identification techniques can also be used in forensic biology. Forensic biology is a scientific field employing genetic typing of biological evidence found at a crime scene as a means for positively identifying, for example, a perpetrator of a crime. To make such an identification, PCR technology can be used to amplify DNA sequences taken from very small biological samples such as tissues, e.g., hair or skin, or body fluids, e.g., blood, saliva, or semen found at a crime scene. The amplified sequence can then be compared to a standard, thereby allowing identification of the origin of the biological sample.

[2005] The sequences of the present invention can be used to provide polynucleotide reagents, e.g., PCR primers, targeted to specific loci in the human genome, which can enhance the reliability of DNA-based forensic identifications by, for example, providing another “identification marker” (i.e. another DNA sequence that is unique to a particular individual). As mentioned above, actual base sequence information can be used for identification as an accurate alternative to patterns formed by restriction enzyme generated fragments. Sequences targeted to noncoding regions of SEQ ID NO:37 are particularly appropriate for this use as greater numbers of polymorphisms occur in the noncoding regions, making it easier to differentiate individuals using this technique. Examples of polynucleotide reagents include the HNMDA-1 nucleotide sequences or portions thereof, e.g., fragments derived from the noncoding regions of SEQ ID NO:37 having a length of at least 20 bases, preferably at least 30 bases.

[2006] The HNMDA-1 nucleotide sequences described herein can further be used to provide polynucleotide reagents, e.g., labeled or labelable probes which can be used in, for example, an in situ hybridization technique, to identify a specific tissue, e.g., brain tissue. This can be very useful in cases where a forensic pathologist is presented with a tissue of unknown origin. Panels of such HNMDA-1 probes can be used to identify tissue by species and/or by organ type.

[2007] In a similar fashion, these reagents, e.g., HNMDA-1 primers or probes can be used to screen tissue culture for contamination (i.e. screen for the presence of a mixture of different types of cells in a culture).

[2008] C. Predictive Medicine:

[2009] The present invention also pertains to the field of predictive medicine in which diagnostic assays, prognostic assays, and monitoring clinical trials are used for prognostic (predictive) purposes to thereby treat an individual prophylactically. Accordingly, one aspect of the present invention relates to diagnostic assays for determining HNMDA-1 polypeptide and/or nucleic acid expression as well as HNMDA-1 activity, in the context of a biological sample (e.g., blood, serum, cells, tissue) to thereby determine whether an individual is afflicted with a disease or disorder, or is at risk of developing a disorder, associated with aberrant or unwanted HNMDA-1 expression or activity. The invention also provides for prognostic (or predictive) assays for determining whether an individual is at risk of developing a disorder associated with HNMDA-1 polypeptide, nucleic acid expression or activity. For example, mutations in an HNMDA-1 gene can be assayed in a biological sample. Such assays can be used for prognostic or predictive purpose to thereby prophylactically treat an individual prior to the onset of a disorder characterized by or associated with HNMDA-1 polypeptide, nucleic acid expression or activity.

[2010] Another aspect of the invention pertains to monitoring the influence of agents (e.g., drugs, compounds) on the expression or activity of HNMDA-1 in clinical trials.

[2011] These and other agents are described in further detail in the following sections.

[2012] 1. Diagnostic Assays

[2013] An exemplary method for detecting the presence or absence of HNMDA-1 polypeptide or nucleic acid in a biological sample involves obtaining a biological sample from a test subject and contacting the biological sample with a compound or an agent capable of detecting HNMDA-1 polypeptide or nucleic acid (e.g., mRNA, or genomic DNA) that encodes HNMDA-1 polypeptide such that the presence of HNMDA-1 polypeptide or nucleic acid is detected in the biological sample. In another aspect, the present invention provides a method for detecting the presence of HNMDA-1 activity in a biological sample by contacting the biological sample with an agent capable of detecting an indicator of HNMDA-1 activity such that the presence of HNMDA-1 activity is detected in the biological sample. A preferred agent for detecting HNMDA-1 mRNA or genomic DNA is a labeled nucleic acid probe capable of hybridizing to HNMDA-1 mRNA or genomic DNA. The nucleic acid probe can be, for example, the HNMDA-1 nucleic acid set forth in SEQ ID NO:37 or 39, or the DNA insert of the plasmid deposited with ATCC as Accession Number ______, or a portion thereof, such as an oligonucleotide of at least 15, 30, 50, 100, 250 or 500 nucleotides in length and sufficient to specifically hybridize under stringent conditions to HNMDA-1 mRNA or genomic DNA. Other suitable probes for use in the diagnostic assays of the invention are described herein.

[2014] A preferred agent for detecting HNMDA-1 polypeptide is an antibody capable of binding to HNMDA-1 polypeptide, preferably an antibody with a detectable label. Antibodies can be polyclonal, or more preferably, monoclonal. An intact antibody, or a fragment thereof (e.g., Fab or F(ab′)₂) can be used. The term “labeled”, with regard to the probe or antibody, is intended to encompass direct labeling of the probe or antibody by coupling (i.e., physically linking) a detectable substance to the probe or antibody, as well as indirect labeling of the probe or antibody by reactivity with another reagent that is directly labeled. Examples of indirect labeling include detection of a primary antibody using a fluorescently labeled secondary antibody and end-labeling of a DNA probe with biotin such that it can be detected with fluorescently labeled streptavidin. The term “biological sample” is intended to include tissues, cells and biological fluids isolated from a subject, as well as tissues, cells and fluids present within a subject. That is, the detection method of the invention can be used to detect HNMDA-1 mRNA, polypeptide, or genomic DNA in a biological sample in vitro as well as in vivo. For example, in vitro techniques for detection of HNMDA-1 mRNA include Northern hybridizations and in situ hybridizations. In vitro techniques for detection of HNMDA-1 polypeptide include enzyme linked immunosorbent assays (ELISAs), Western blots, immunoprecipitations and immunofluorescence. In vitro techniques for detection of HNMDA-1 genomic DNA include Southern hybridizations. Furthermore, in vivo techniques for detection of HNMDA-1 polypeptide include introducing into a subject a labeled anti-HNMDA-1 antibody. For example, the antibody can be labeled with a radioactive marker whose presence and location in a subject can be detected by standard imaging techniques.

[2015] The present invention also provides diagnostic assays for identifying the presence or absence of a genetic alteration characterized by at least one of (i) aberrant modification or mutation of a gene encoding an HNMDA-1 polypeptide; (ii) aberrant expression of a gene encoding an HNMDA-1 polypeptide; (iii) mis-regulation of the gene; and (iii) aberrant post-translational modification of an HNMDA-1 polypeptide, wherein a wild-type form of the gene encodes a polypeptide with an HNMDA-1 activity. “Misexpression or aberrant expression”, as used herein, refers to a non-wild type pattern of gene expression, at the RNA or protein level. It includes, but is not limited to, expression at non-wild type levels (e.g., over or under expression); a pattern of expression that differs from wild type in terms of the time or stage at which the gene is expressed (e.g., increased or decreased expression (as compared with wild type) at a predetermined developmental period or stage); a pattern of expression that differs from wild type in terms of decreased expression (as compared with wild type) in a predetermined cell type or tissue type; a pattern of expression that differs from wild type in terms of the splicing size, amino acid sequence, post-transitional modification, or biological activity of the expressed polypeptide; a pattern of expression that differs from wild type in terms of the effect of an environmental stimulus or extracellular stimulus on expression of the gene (e.g., a pattern of increased or decreased expression (as compared with wild type) in the presence of an increase or decrease in the strength of the stimulus).

[2016] In one embodiment, the biological sample contains protein molecules from the test subject. Alternatively, the biological sample can contain mRNA molecules from the test subject or genomic DNA molecules from the test subject. A preferred biological sample is a serum sample isolated by conventional means from a subject.

[2017] In another embodiment, the methods further involve obtaining a control biological sample from a control subject, contacting the control sample with a compound or agent capable of detecting HNMDA-1 polypeptide, mRNA, or genomic DNA, such that the presence of HNMDA-1 polypeptide, mRNA or genomic DNA is detected in the biological sample, and comparing the presence of HNMDA-1 polypeptide, mRNA or genomic DNA in the control sample with the presence of HNMDA-1 polypeptide, mRNA or genomic DNA in the test sample.

[2018] The invention also encompasses kits for detecting the presence of HNMDA-1 in a biological sample. For example, the kit can comprise a labeled compound or agent capable of detecting HNMDA-1 polypeptide or mRNA in a biological sample; means for determining the amount of HNMDA-1 in the sample; and means for comparing the amount of HNMDA-1 in the sample with a standard. The compound or agent can be packaged in a suitable container. The kit can further comprise instructions for using the kit to detect HNMDA-1 polypeptide or nucleic acid.

[2019] 2. Prognostic Assays

[2020] The diagnostic methods described herein can furthermore be utilized to identify subjects having or at risk of developing a disease or disorder associated with aberrant or unwanted HNMDA-1 expression or activity. As used herein, the term “aberrant” includes an HNMDA-1 expression or activity which deviates from the wild type HNMDA-1 expression or activity. Aberrant expression or activity includes increased or decreased expression or activity, as well as expression or activity which does not follow the wild type developmental pattern of expression or the subcellular pattern of expression. For example, aberrant HNMDA-1 expression or activity is intended to include the cases in which a mutation in the HNMDA-1 gene causes the HNMDA-1 gene to be under-expressed or over-expressed and situations in which such mutations result in a non-functional HNMDA-1 polypeptide or a polypeptide which does not function in a wild-type fashion, e.g., a polypeptide which does not interact with an HNMDA-1 substrate, e.g., a glutamate-gated ion channel family member subunit or ligand, or one which interacts with a non-HNMDA-1 substrate, e.g. a non-glutamate-gated ion channel family member subunit or ligand. As used herein, the term “unwanted” includes an unwanted phenomenon involved in a biological response, such as cellular proliferation. For example, the term unwanted includes an HNMDA-1 expression or activity which is undesirable in a subject.

[2021] The assays described herein, such as the preceding diagnostic assays or the following assays, can be utilized to identify a subject having or at risk of developing a disorder associated with a misregulation in HNMDA-1 polypeptide activity or nucleic acid expression, such as a glutamate-gated ion channel disorder. Alternatively, the prognostic assays can be utilized to identify a subject having or at risk for developing a disorder associated with a misregulation in HNMDA-1 polypeptide activity or nucleic acid expression, such as a glutamate-gated ion channel disorder. Thus, the present invention provides a method for identifying a disease or disorder associated with aberrant or unwanted HNMDA-1 expression or activity in which a test sample is obtained from a subject and HNMDA-1 polypeptide or nucleic acid (e.g., mRNA or genomic DNA) is detected, wherein the presence of HNMDA-1 polypeptide or nucleic acid is diagnostic for a subject having or at risk of developing a disease or disorder associated with aberrant or unwanted HNMDA-1 expression or activity. As used herein, a “test sample” refers to a biological sample obtained from a subject of interest. For example, a test sample can be a biological fluid (e.g., serum), cell sample, or tissue.

[2022] Furthermore, the prognostic assays described herein can be used to determine whether a subject can be administered an agent (e.g., an agonist, antagonist, peptidomimetic, protein, peptide, nucleic acid, small molecule, or other drug candidate) to treat a disease or disorder associated with aberrant or unwanted HNMDA-1 expression or activity. For example, such methods can be used to determine whether a subject can be effectively treated with an agent for a glutamate-gated ion channel disorder. Thus, the present invention provides methods for determining whether a subject can be effectively treated with an agent for a disorder associated with aberrant or unwanted HNMDA-1 expression or activity in which a test sample is obtained and HNMDA-1 polypeptide or nucleic acid expression or activity is detected (e.g., wherein the abundance of HNMDA-1 polypeptide or nucleic acid expression or activity is diagnostic for a subject that can be administered the agent to treat a disorder associated with aberrant or unwanted HNMDA-1 expression or activity).

[2023] The methods of the invention can also be used to detect genetic alterations in an HNMDA-1 gene, thereby determining if a subject with the altered gene is at risk for a disorder characterized by misregulation in HNMDA-1 polypeptide activity or nucleic acid expression, such as a glutamate-gated ion channel disorder. In preferred embodiments, the methods include detecting, in a sample of cells from the subject, the presence or absence of a genetic alteration characterized by at least one of an alteration affecting the integrity of a gene encoding an HNMDA-1-polypeptide, or the mis-expression of the HNMDA-1 gene. For example, such genetic alterations can be detected by ascertaining the existence of at least one of 1) a deletion of one or more nucleotides from an HNMDA-1 gene; 2) an addition of one or more nucleotides to an HNMDA-1 gene; 3) a substitution of one or more nucleotides of an HNMDA-1 gene, 4) a chromosomal rearrangement of an HNMDA-1 gene; 5) an alteration in the level of a messenger RNA transcript of an HNMDA-1 gene, 6) aberrant modification of an HNMDA-1 gene, such as of the methylation pattern of the genomic DNA, 7) the presence of a non-wild type splicing pattern of a messenger RNA transcript of an HNMDA-1 gene, 8) a non-wild type level of an HNMDA-1-polypeptide, 9) allelic loss of an HNMDA-1 gene, and 10) inappropriate post-translational modification of an HNMDA-1-polypeptide. As described herein, there are a large number of assays known in the art which can be used for detecting alterations in an HNMDA-1 gene. A preferred biological sample is a tissue or serum sample isolated by conventional means from a subject.

[2024] In certain embodiments, detection of the alteration involves the use of a probe/primer in a polymerase chain reaction (PCR) (see, e.g., U.S. Pat. Nos. 4,683,195 and 4,683,202), such as anchor PCR or RACE PCR, or, alternatively, in a ligation chain reaction (LCR) (see, e.g., Landegran et al. (1988) Science 241:1077-1080; and Nakazawa et al. (1994) Proc. Natl. Acad. Sci. USA 91:360-364), the latter of which can be particularly useful for detecting point mutations in the HNMDA-1-gene (see Abravaya et al. (1995) Nucleic Acids Res. 23:675-682). This method can include the steps of collecting a sample of cells from a subject, isolating nucleic acid (e.g., genomic, mRNA or both) from the cells of the sample, contacting the nucleic acid sample with one or more primers which specifically hybridize to an HNMDA-1 gene under conditions such that hybridization and amplification of the HNMDA-1-gene (if present) occurs, and detecting the presence or absence of an amplification product, or detecting the size of the amplification product and comparing the length to a control sample. It is anticipated that PCR and/or LCR may be desirable to use as a preliminary amplification step in conjunction with any of the techniques used for detecting mutations described herein.

[2025] Alternative amplification methods include: self sustained sequence replication (Guatelli, J. C. et al., (1990) Proc. Natl. Acad. Sci. USA 87:1874-1878), transcriptional amplification system (Kwoh, D. Y. et al., (1989) Proc. Natl. Acad. Sci. USA 86:1173-1177), Q-Beta Replicase (Lizardi, P. M. et al. (1988) Bio-Technology 6:1197), or any other nucleic acid amplification method, followed by the detection of the amplified molecules using techniques well known to those of skill in the art. These detection schemes are especially useful for the detection of nucleic acid molecules if such molecules are present in very low numbers.

[2026] In an alternative embodiment, mutations in an HNMDA-1 gene from a sample cell can be identified by alterations in restriction enzyme cleavage patterns. For example, sample and control DNA is isolated, amplified (optionally), digested with one or more restriction endonucleases, and fragment length sizes are determined by gel electrophoresis and compared. Differences in fragment length sizes between sample and control DNA indicates mutations in the sample DNA. Moreover, the use of sequence specific ribozymes (see, for example, U.S. Pat. No. 5,498,531) can be used to score for the presence of specific mutations by development or loss of a ribozyme cleavage site.

[2027] In other embodiments, genetic mutations in HNMDA-1 can be identified by hybridizing a sample and control nucleic acids, e.g., DNA or RNA, to high density arrays containing hundreds or thousands of oligonucleotides probes (Cronin, M. T. et al. (1996) Human Mutation 7: 244-255; Kozal, M. J. et al. (1996) Nature Medicine 2: 753-759). For example, genetic mutations in HNMDA-1 can be identified in two dimensional arrays containing light-generated DNA probes as described in Cronin, M. T. et al. supra. Briefly, a first hybridization array of probes can be used to scan through long stretches of DNA in a sample and control to identify base changes between the sequences by making linear arrays of sequential overlapping probes. This step allows the identification of point mutations. This step is followed by a second hybridization array that allows the characterization of specific mutations by using smaller, specialized probe arrays complementary to all variants or mutations detected. Each mutation array is composed of parallel probe sets, one complementary to the wild-type gene and the other complementary to the mutant gene.

[2028] In yet another embodiment, any of a variety of sequencing reactions known in the art can be used to directly sequence the HNMDA-1 gene and detect mutations by comparing the sequence of the sample HNMDA-1 with the corresponding wild-type (control) sequence. Examples of sequencing reactions include those based on techniques developed by Maxam and Gilbert ((1977) Proc. Natl. Acad. Sci. USA 74:560) or Sanger ((1977) Proc. Natl. Acad. Sci. USA 74:5463). It is also contemplated that any of a variety of automated sequencing procedures can be utilized when performing the diagnostic assays ((1995) Biotechniques 19:448), including sequencing by mass spectrometry (see, e.g., PCT International Publication No. WO 94/16101; Cohen et al. (1996) Adv. Chromatogr. 36:127-162; and Griffin et al. (1993) Appl. Biochem. Biotechnol. 38:147-159).

[2029] Other methods for detecting mutations in the HNMDA-1 gene include methods in which protection from cleavage agents is used to detect mismatched bases in RNA/RNA or RNA/DNA heteroduplexes (Myers et al. (1985) Science 230:1242). In general, the art technique of “mismatch cleavage” starts by providing heteroduplexes of formed by hybridizing (labeled) RNA or DNA containing the wild-type HNMDA-1 sequence with potentially mutant RNA or DNA obtained from a tissue sample. The double-stranded duplexes are treated with an agent which cleaves single-stranded regions of the duplex such as which will exist due to basepair mismatches between the control and sample strands. For instance, RNA/DNA duplexes can be treated with RNase and DNA/DNA hybrids treated with S1 nuclease to enzymatically digesting the mismatched regions. In other embodiments, either DNA/DNA or RNA/DNA duplexes can be treated with hydroxylamine or osmium tetroxide and with piperidine in order to digest mismatched regions. After digestion of the mismatched regions, the resulting material is then separated by size on denaturing polyacrylamide gels to determine the site of mutation. See, for example, Cotton et al. (1988) Proc. Natl Acad Sci USA 85:4397; Saleeba et al. (1992) Methods Enzymol. 217:286-295. In a preferred embodiment, the control DNA or RNA can be labeled for detection.

[2030] In still another embodiment, the mismatch cleavage reaction employs one or more proteins that recognize mismatched base pairs in double-stranded DNA (so called “DNA mismatch repair” enzymes) in defined systems for detecting and mapping point mutations in HNMDA-1 cDNAs obtained from samples of cells. For example, the mutY enzyme of E. coli cleaves A at G/A mismatches and the thymidine DNA glycosylase from HeLa cells cleaves T at G/T mismatches (Hsu et al. (1994) Carcinogenesis 15:1657-1662). According to an exemplary embodiment, a probe based on an HNMDA-1 sequence, e.g., a wild-type HNMDA-1 sequence, is hybridized to a cDNA or other DNA product from a test cell(s). The duplex is treated with a DNA mismatch repair enzyme, and the cleavage products, if any, can be detected from electrophoresis protocols or the like. See, for example, U.S. Pat. No. 5,459,039.

[2031] In other embodiments, alterations in electrophoretic mobility will be used to identify mutations in HNMDA-1 genes. For example, single strand conformation polymorphism (SSCP) may be used to detect differences in electrophoretic mobility between mutant and wild type nucleic acids (Orita et al. (1989) Proc Natl. Acad. Sci USA: 86:2766, see also Cotton (1993) Mutat. Res. 285:125-144; and Hayashi (1992) Genet. Anal. Tech. Appl. 9:73-79). Single-stranded DNA fragments of sample and control HNMDA-1 nucleic acids will be denatured and allowed to renature. The secondary structure of single-stranded nucleic acids varies according to sequence, the resulting alteration in electrophoretic mobility enables the detection of even a single base change. The DNA fragments may be labeled or detected with labeled probes. The sensitivity of the assay may be enhanced by using RNA (rather than DNA), in which the secondary structure is more sensitive to a change in sequence. In a preferred embodiment, the subject method utilizes heteroduplex analysis to separate double stranded heteroduplex molecules on the basis of changes in electrophoretic mobility (Keen et al. (1991) Trends Genet 7:5).

[2032] In yet another embodiment the movement of mutant or wild-type fragments in polyacrylamide gels containing a gradient of denaturant is assayed using denaturing gradient gel electrophoresis (DGGE) (Myers et al. (1985) Nature 313:495). When DGGE is used as the method of analysis, DNA will be modified to insure that it does not completely denature, for example by adding a GC clamp of approximately 40 bp of high-melting GC-rich DNA by PCR. In a further embodiment, a temperature gradient is used in place of a denaturing gradient to identify differences in the mobility of control and sample DNA (Rosenbaum and Reissner (1987) Biophys Chem 265:12753).

[2033] Examples of other techniques for detecting point mutations include, but are not limited to, selective oligonucleotide hybridization, selective amplification, or selective primer extension. For example, oligonucleotide primers may be prepared in which the known mutation is placed centrally and then hybridized to target DNA under conditions which permit hybridization only if a perfect match is found (Saiki et al. (1986) Nature 324:163); Saiki et al. (1989) Proc. Natl Acad. Sci USA 86:6230). Such allele specific oligonucleotides are hybridized to PCR amplified target DNA or a number of different mutations when the oligonucleotides are attached to the hybridizing membrane and hybridized with labeled target DNA.

[2034] Alternatively, allele specific amplification technology which depends on selective PCR amplification may be used in conjunction with the instant invention. Oligonucleotides used as primers for specific amplification may carry the mutation of interest in the center of the molecule (so that amplification depends on differential hybridization) (Gibbs et al. (1989) Nucleic Acids Res. 17:2437-2448) or at the extreme 3′ end of one primer where, under appropriate conditions, mismatch can prevent, or reduce polymerase extension (Prossner (1993) Tibtech 11:238). In addition it may be desirable to introduce a novel restriction site in the region of the mutation to create cleavage-based detection (Gasparini et al. (1992) Mol. Cell Probes 6:1). It is anticipated that in certain embodiments amplification may also be performed using Taq ligase for amplification (Barany (1991) Proc. Natl. Acad. Sci USA 88:189). In such cases, ligation will occur only if there is a perfect match at the 3′ end of the 5′ sequence making it possible to detect the presence of a known mutation at a specific site by looking for the presence or absence of amplification.

[2035] The methods described herein may be performed, for example, by utilizing pre-packaged diagnostic kits comprising at least one probe nucleic acid or antibody reagent described herein, which may be conveniently used, e.g., in clinical settings to diagnose patients exhibiting symptoms or family history of a disease or illness involving an HNMDA-1 gene.

[2036] Furthermore, any cell type or tissue in which HNMDA-1 is expressed may be utilized in the prognostic assays described herein.

[2037] 3. Monitoring of Effects During Clinical Trials

[2038] Monitoring the influence of agents (e.g., drugs) on the expression or activity of an HNMDA-1 polypeptide (e.g., the modulation of Ca²⁺ transport and L-glutamate and/or glycine binding) can be applied not only in basic drug screening, but also in clinical trials. For example, the effectiveness of an agent determined by a screening assay as described herein to increase HNMDA-1 gene expression, polypeptide levels, or upregulate HNMDA-1 activity, can be monitored in clinical trials of subjects exhibiting decreased HNMDA-1 gene expression, polypeptide levels, or downregulated HNMDA-1 activity. Alternatively, the effectiveness of an agent determined by a screening assay to decrease HNMDA-1 gene expression, polypeptide levels, or downregulate HNMDA-1 activity, can be monitored in clinical trials of subjects exhibiting increased HNMDA-1 gene expression, polypeptide levels, or upregulated HNMDA-1 activity. In such clinical trials, the expression or activity of an HNMDA-1 gene, and preferably, other genes that have been implicated in, for example, an HNMDA-1-associated disorder can be used as a “read out” or markers of the phenotype of a particular cell.

[2039] For example, and not by way of limitation, genes, including HNMDA-1, that are modulated in cells by treatment with an agent (e.g., compound, drug or small molecule) which modulates HNMDA-1 activity (e.g., identified in a screening assay as described herein) can be identified. Thus, to study the effect of agents on glutamate-gated ion channel-associated disorders (e.g., disorders characterized by deregulated long term potentiation or Ca²⁺ transport), for example, in a clinical trial, cells can be isolated and RNA prepared and analyzed for the levels of expression of HNMDA-1 and other genes implicated in the glutamate-gated ion channel-associated disorder, respectively. The levels of gene expression (e.g., a gene expression pattern) can be quantified by northern blot analysis or RT-PCR, as described herein, or alternatively by measuring the amount of polypeptide produced, by one of the methods as described herein, or by measuring the levels of activity of HNMDA-1 or other genes. In this way, the gene expression pattern can serve as a marker, indicative of the physiological response of the cells to the agent. Accordingly, this response state may be determined before, and at various points during treatment of the individual with the agent.

[2040] In a preferred embodiment, the present invention provides a method for monitoring the effectiveness of treatment of a subject with an agent (e.g., an agonist, antagonist, peptidomimetic, protein, peptide, nucleic acid, small molecule, or other drug candidate identified by the screening assays described herein) including the steps of (i) obtaining a pre-administration sample from a subject prior to administration of the agent; (ii) detecting the level of expression of an HNMDA-1 polypeptide, mRNA, or genomic DNA in the preadministration sample; (iii) obtaining one or more post-administration samples from the subject; (iv) detecting the level of expression or activity of the HNMDA-1 polypeptide, mRNA, or genomic DNA in the post-administration samples; (v) comparing the level of expression or activity of the HNMDA-1 polypeptide, mRNA, or genomic DNA in the pre-administration sample with the HNMDA-1 polypeptide, mRNA, or genomic DNA in the post administration sample or samples; and (vi) altering the administration of the agent to the subject accordingly. For example, increased administration of the agent may be desirable to increase the expression or activity of FINMDA-1 to higher levels than detected, i.e., to increase the effectiveness of the agent. Alternatively, decreased administration of the agent may be desirable to decrease expression or activity of HNMDA-1 to lower levels than detected, i.e. to decrease the effectiveness of the agent. According to such an embodiment, HNMDA-1 expression or activity may be used as an indicator of the effectiveness of an agent, even in the absence of an observable phenotypic response.

[2041] 4. Methods of Treatment:

[2042] The present invention provides for both prophylactic and therapeutic methods of treating a subject at risk of (or susceptible to) a disorder or having a disorder associated with aberrant or unwanted HNMDA-1 expression or activity, e.g. a glutamate-gated ion channel disorder. With regards to both prophylactic and therapeutic methods of treatment, such treatments may be specifically tailored or modified, based on knowledge obtained from the field of pharmacogenomics. “Pharmacogenomics”, as used herein, refers to the application of genomics technologies such as gene sequencing, statistical genetics, and gene expression analysis to drugs in clinical development and on the market. More specifically, the term refers the study of how a patient's genes determine his or her response to a drug (e.g., a patient's “drug response phenotype”, or “drug response genotype”). Thus, another aspect of the invention provides methods for tailoring an individual's prophylactic or therapeutic treatment with either the HNMDA-1 molecules of the present invention or HNMDA-1 modulators according to that individual's drug response genotype. Pharmacogenomics allows a clinician or physician to target prophylactic or therapeutic treatments to patients who will most benefit from the treatment and to avoid treatment of patients who will experience toxic drug-related side effects.

[2043] 2. Prophylactic Methods

[2044] In one aspect, the invention provides a method for preventing in a subject, a disease or condition associated with an aberrant or unwanted HNMDA-1 expression or activity, by administering to the subject an HNMDA-1 or an agent which modulates HNMDA-1 expression or at least one HNMDA-1 activity. Subjects at risk for a disease which is caused or contributed to by aberrant or unwanted HNMDA-1 expression or activity can be identified by, for example, any or a combination of diagnostic or prognostic assays as described herein. Administration of a prophylactic agent can occur prior to the manifestation of symptoms characteristic of the HNMDA-1 aberrancy, such that a disease or disorder is prevented or, alternatively, delayed in its progression. Depending on the type of HNMDA-1 aberrancy, for example, an HNMDA-1 agonist or HNMDA-1 antagonist agent can be used for treating the subject. The appropriate agent can be determined based on screening assays described herein.

[2045] 2. Therapeutic Methods

[2046] Another aspect of the invention pertains to methods of modulating HNMDA-1 expression or activity for therapeutic purposes. Accordingly, in an exemplary embodiment, the modulatory method of the invention involves contacting a cell capable of expressing HNMDA-1 with an agent that modulates one or more of the activities of HNMDA-1 polypeptide activity associated with the cell, such that HNMDA-1 activity in the cell is modulated. An agent that modulates HNMDA-1 polypeptide activity can be an agent as described herein, such as a nucleic acid or a polypeptide, a naturally-occurring target molecule of an HNMDA-1 polypeptide (e.g., an HNMDA-1 substrate), an HNMDA-1 antibody, an HNMDA-1 agonist or antagonist, a peptidomimetic of an HNMDA-1 agonist or antagonist, or other small molecule. In one embodiment, the agent stimulates one or more HNMDA-1 activities. Examples of such stimulatory agents include active HNMDA-1 polypeptide and a nucleic acid molecule encoding HNMDA-1 that has been introduced into the cell. In another embodiment, the agent inhibits one or more HNMDA-1 activities. Examples of such inhibitory agents include antisense HNMDA-1 nucleic acid molecules, anti-HNMDA-1 antibodies, and HNMDA-1 inhibitors. These modulatory methods can be performed in vitro (e.g., by culturing the cell with the agent) or, alternatively, in vivo (e.g., by administering the agent to a subject). As such, the present invention provides methods of treating an individual afflicted with a disease or disorder characterized by aberrant or unwanted expression or activity of an HNMDA-1 polypeptide or nucleic acid molecule. In one embodiment, the method involves administering an agent (e.g., an agent identified by a screening assay described herein), or combination of agents that modulates (e.g., upregulates or downregulates) HNMDA-1 expression or activity. In another embodiment, the method involves administering an HNMDA-1 polypeptide or nucleic acid molecule as therapy to compensate for reduced, aberrant, or unwanted HNMDA-1 expression or activity.

[2047] Stimulation of HNMDA-1 activity is desirable in situations in which HNMDA-1 is abnormally downregulated and/or in which increased HNMDA-1 activity is likely to have a beneficial effect. Likewise, inhibition of HNMDA-1 activity is desirable in situations in which HNMDA-1 is abnormally upregulated and/or in which decreased HNMDA-1 activity is likely to have a beneficial effect.

[2048] 3. Pharmacogenomics

[2049] The HNMDA-1 molecules of the present invention, as well as agents, or modulators which have a stimulatory or inhibitory effect on HNMDA-1 activity (e.g., HNMDA-1 gene expression) as identified by a screening assay described herein can be administered to individuals to treat (prophylactically or therapeutically) glutamate-gated ion channel-associated disorders (e.g., learning or memory disorders) associated with aberrant or unwanted HNMDA-1 activity. In conjunction with such treatment, pharmacogenomics (i.e., the study of the relationship between an individual's genotype and that individual's response to a foreign compound or drug) may be considered. Differences in metabolism of therapeutics can lead to severe toxicity or therapeutic failure by altering the relation between dose and blood concentration of the pharmacologically active drug. Thus, a physician or clinician may consider applying knowledge obtained in relevant pharmacogenomics studies in determining whether to administer an HNMDA-1 molecule or HNMDA-1 modulator as well as tailoring the dosage and/or therapeutic regimen of treatment with an HNMDA-1 molecule or HNMDA-1 modulator.

[2050] Pharmacogenomics deals with clinically significant hereditary variations in the response to drugs due to altered drug disposition and abnormal action in affected persons. See, for example, Eichelbaum, M. et al. (1996) Clin. Exp. Pharmacol. Physiol. 23(10-11): 983-985 and Linder, M. W. et al. (1997) Clin. Chem. 43(2):254-266. In general, two types of pharmacogenetic conditions can be differentiated. Genetic conditions transmitted as a single factor altering the way drugs act on the body (altered drug action) or genetic conditions transmitted as single factors altering the way the body acts on drugs (altered drug metabolism). These pharmacogenetic conditions can occur either as rare genetic defects or as naturally-occurring polymorphisms. For example, glucose-6-phosphate dehydrogenase deficiency (G6PD) is a common inherited enzymopathy in which the main clinical complication is haemolysis after ingestion of oxidant drugs (anti-malarials, sulfonamides, analgesics, nitrofurans) and consumption of fava beans.

[2051] One pharmacogenomics approach to identifying genes that predict drug response, known as “a genome-wide association”, relies primarily on a high-resolution map of the human genome consisting of already known gene-related markers (e.g., a “bi-allelic” gene marker map which consists of 60,000-100,000 polymorphic or variable sites on the human genome, each of which has two variants.) Such a high-resolution genetic map can be compared to a map of the genome of each of a statistically significant number of patients taking part in a Phase II/III drug trial to identify markers associated with a particular observed drug response or side effect. Alternatively, such a high resolution map can be generated from a combination of some ten-million known single nucleotide polymorphisms (SNPs) in the human genome. As used herein, a “SNP” is a common alteration that occurs in a single nucleotide base in a stretch of DNA. For example, a SNP may occur once per every 1000 bases of DNA. A SNP may be involved in a disease process, however, the vast majority may not be disease-associated. Given a genetic map based on the occurrence of such SNPs, individuals can be grouped into genetic categories depending on a particular pattern of SNPs in their individual genome. In such a manner, treatment regimens can be tailored to groups of genetically similar individuals, taking into account traits that may be common among such genetically similar individuals.

[2052] Alternatively, a method termed the “candidate gene approach”, can be utilized to identify genes that predict drug response. According to this method, if a gene that encodes a drugs target is known (e.g., an HNMDA-1 polypeptide of the present invention), all common variants of that gene can be fairly easily identified in the population and it can be determined if having one version of the gene versus another is associated with a particular drug response.

[2053] As an illustrative embodiment, the activity of drug metabolizing enzymes is a major determinant of both the intensity and duration of drug action. The discovery of genetic polymorphisms of drug metabolizing enzymes (e.g., N-acetyltransferase 2 (NAT 2) and cytochrome P450 enzymes CYP2D6 and CYP2C19) has provided an explanation as to why some patients do not obtain the expected drug effects or show exaggerated drug response and serious toxicity after taking the standard and safe dose of a drug. These polymorphisms are expressed in two phenotypes in the population, the extensive metabolizer (EM) and poor metabolizer (PM). The prevalence of PM is different among different populations. For example, the gene coding for CYP2D6 is highly polymorphic and several mutations have been identified in PM, which all lead to the absence of functional CYP2D6. Poor metabolizers of CYP2D6 and CYP2C19 quite frequently experience exaggerated drug response and side effects when they receive standard doses. If a metabolite is the active therapeutic moiety, PM show no therapeutic response, as demonstrated for the analgesic effect of codeine mediated by its CYP2D6-formed metabolite morphine. The other extreme are the so called ultra-rapid metabolizers who do not respond to standard doses. Recently, the molecular basis of ultra-rapid metabolism has been identified to be due to CYP2D6 gene amplification.

[2054] Alternatively, a method termed the “gene expression profiling”, can be utilized to identify genes that predict drug response. For example, the gene expression of an animal dosed with a drug (e.g., an HNMDA-1 molecule or HNMDA-1 modulator of the present invention) can give an indication whether gene pathways related to toxicity have been turned on.

[2055] Information generated from more than one of the above pharmacogenomics approaches can be used to determine appropriate dosage and treatment regimens for prophylactic or therapeutic treatment an individual. This knowledge, when applied to dosing or drug selection, can avoid adverse reactions or therapeutic failure and thus enhance therapeutic or prophylactic efficiency when treating a subject with an HNMDA-1 molecule or HNMDA-1 modulator, such as a modulator identified by one of the exemplary screening assays described herein.

[2056] 4. Use of HNMDA-1 Molecules as Surrogate Markers

[2057] The HNMDA-1 molecules of the invention are also useful as markers of disorders or disease states, as markers for precursors of disease states, as markers for predisposition of disease states, as markers of drug activity, or as markers of the pharmacogenomic profile of a subject. Using the methods described herein, the presence, absence and/or quantity of the HNMDA-1 molecules of the invention may be detected, and may be correlated with one or more biological states in vivo. For example, the HNMDA-1 molecules of the invention may serve as surrogate markers for one or more disorders or disease states or for conditions leading up to disease states. As used herein, a “surrogate marker” is an objective biochemical marker which correlates with the absence or presence of a disease or disorder, or with the progression of a disease or disorder (e.g., with the presence or absence of a tumor). The presence or quantity of such markers is independent of the disease. Therefore, these markers may serve to indicate whether a particular course of treatment is effective in lessening a disease state or disorder. Surrogate markers are of particular use when the presence or extent of a disease state or disorder is difficult to assess through standard methodologies (e.g., early stage tumors), or when an assessment of disease progression is desired before a potentially dangerous clinical endpoint is reached (e.g., an assessment of cardiovascular disease may be made using cholesterol levels as a surrogate marker, and an analysis of HIV infection may be made using HIV RNA levels as a surrogate marker, well in advance of the undesirable clinical outcomes of myocardial infarction or fully-developed AIDS). Examples of the use of surrogate markers in the art include: Koomen et al. (2000) J. Mass. Spectrom. 35: 258-264; and James (1994) AIDS Treatment News Archive 209.

[2058] The HNMDA-1 molecules of the invention are also useful as pharmacodynamic markers. As used herein, a “pharmacodynamic marker” is an objective biochemical marker which correlates specifically with drug effects. The presence or quantity of a pharmacodynamic marker is not related to the disease state or disorder for which the drug is being administered; therefore, the presence or quantity of the marker is indicative of the presence or activity of the drug in a subject. For example, a pharmacodynamic marker may be indicative of the concentration of the drug in a biological tissue, in that the marker is either expressed or transcribed or not expressed or transcribed in that tissue in relationship to the level of the drug. In this fashion, the distribution or uptake of the drug may be monitored by the pharmacodynamic marker. Similarly, the presence or quantity of the pharmacodynamic marker may be related to the presence or quantity of the metabolic product of a drug, such that the presence or quantity of the marker is indicative of the relative breakdown rate of the drug in vivo. Pharmacodynamic markers are of particular use in increasing the sensitivity of detection of drug effects, particularly when the drug is administered in low doses. Since even a small amount of a drug may be sufficient to activate multiple rounds of marker (e.g., an HNMDA-1 marker) transcription or expression, the amplified marker may be in a quantity which is more readily detectable than the drug itself. Also, the marker may be more easily detected due to the nature of the marker itself; for example, using the methods described herein, anti-HNMDA-1 antibodies may be employed in an immune-based detection system for an HNMDA-1 polypeptide marker, or HNMDA-1-specific radiolabeled probes may be used to detect an HNMDA-1 mRNA marker. Furthermore, the use of a pharmacodynamic marker may offer mechanism-based prediction of risk due to drug treatment beyond the range of possible direct observations. Examples of the use of pharmacodynamic markers in the art include: Matsuda et al. U.S. Pat. No. 6,033,862; Hattis et al. (1991) Env. Health Perspect. 90: 229-238; Schentag (1999) Am. J. Health-Syst. Pharm. 56 Suppl. 3: S21-S24; and Nicolau (1999) Am, J. Health-Syst. Pharm. 56 Suppl. 3: S16-S20.

[2059] The HNMDA-1 molecules of the invention are also useful as pharmacogenomic markers. As used herein, a “pharmacogenomic marker” is an objective biochemical marker which correlates with a specific clinical drug response or susceptibility in a subject (see, e.g., McLeod et al. (1999) Eur. J. Cancer 35(12): 1650-1652). The presence or quantity of the pharmacogenomic marker is related to the predicted response of the subject to a specific drug or class of drugs prior to administration of the drug. By assessing the presence or quantity of one or more pharmacogenomic markers in a subject, a drug therapy which is most appropriate for the subject, or which is predicted to have a greater degree of success, may be selected. For example, based on the presence or quantity of RNA, or polypeptide (e.g., HNMDA-1 polypeptide or RNA) for specific tumor markers in a subject, a drug or course of treatment may be selected that is optimized for the treatment of the specific tumor likely to be present in the subject. Similarly, the presence or absence of a specific sequence mutation in HNMDA-1 DNA may correlate HNMDA-1 drug response. The use of pharmacogenomic markers therefore permits the application of the most appropriate treatment for each subject without having to administer the therapy.

[2060] 5. Electronic Apparatus Readable Media and Arrays

[2061] Electronic apparatus readable media comprising HNMDA-1 sequence information is also provided. As used herein, “HNMDA-1 sequence information” refers to any nucleotide and/or amino acid sequence information particular to the HNMDA-1 molecules of the present invention, including but not limited to full-length nucleotide and/or amino acid sequences, partial nucleotide and/or amino acid sequences, polymorphic sequences including single nucleotide polymorphisms (SNPs), epitope sequences, and the like. Moreover, information “related to” said HNMDA-1 sequence information includes detection of the presence or absence of a sequence (e.g., detection of expression of a sequence, fragment, polymorphism, etc.), determination of the level of a sequence (e.g., detection of a level of expression, for example, a quantitative detection), detection of a reactivity to a sequence (e.g., detection of protein expression and/or levels, for example, using a sequence-specific antibody), and the like. As used herein, “electronic apparatus readable media” refers to any suitable medium for storing, holding, or containing data or information that can be read and accessed directly by an electronic apparatus. Such media can include, but are not limited to: magnetic storage media, such as floppy discs, hard disc storage medium, and magnetic tape; optical storage media such as compact discs; electronic storage media such as RAM, ROM, EPROM, EEPROM and the like; and general hard disks and hybrids of these categories such as magnetic/optical storage media. The medium is adapted or configured for having recorded thereon HNMDA-1 sequence information of the present invention.

[2062] As used herein, the term “electronic apparatus” is intended to include any suitable computing or processing apparatus or other device configured or adapted for storing data or information. Examples of electronic apparatus suitable for use with the present invention include stand-alone computing apparatuses; networks, including a local area network (LAN), a wide area network (WAN) Internet, Intranet, and Extranet; electronic appliances such as a personal digital assistants (PDAs), cellular phone, pager and the like; and local and distributed processing systems.

[2063] As used herein, “recorded” refers to a process for storing or encoding information on the electronic apparatus readable medium. Those skilled in the art can readily adopt any of the presently known methods for recording information on known media to generate manufactures comprising the HNMDA-1 sequence information. A variety of software programs and formats can be used to store the sequence information on the electronic apparatus readable medium. For example, the sequence information can be represented in a word processing text file, formatted in commercially-available software such as WordPerfect and Microsoft Word, represented in the form of an ASCII file, or stored in a database application, such as DB2, Sybase, Oracle, or the like, as well as in other forms. Any number of dataprocessor structuring formats (e.g., text file or database) may be employed in order to obtain or create a medium having recorded thereon the HNMDA-1 sequence information.

[2064] By providing HNMDA-1 sequence information in readable form, one can routinely access the sequence information for a variety of purposes. For example, one skilled in the art can use the sequence information in readable form to compare a target sequence or target structural motif with the sequence information stored within the data storage means. Search means are used to identify fragments or regions of the sequences of the invention which match a particular target sequence or target motif.

[2065] The present invention therefore provides a medium for holding instructions for performing a method for determining whether a subject has a HNMDA-1 associated disease or disorder or a pre-disposition to a HNMDA-1 associated disease or disorder, wherein the method comprises the steps of determining HNMDA-1 sequence information associated with the subject and based on the HNMDA-1 sequence information, determining whether the subject has a HNMDA-1 associated disease or disorder or a pre-disposition to a HNMDA-1 associated disease or disorder, and/or recommending a particular treatment for the disease, disorder, or pre-disease condition.

[2066] The present invention further provides in an electronic system and/or in a network, a method for determining whether a subject has a HNMDA-1 associated disease or disorder or a pre-disposition to a disease associated with HNMDA-1 wherein the method comprises the steps of determining HNMDA-1 sequence information associated with the subject, and based on the HNMDA-1 sequence information, determining whether the subject has a HNMDA-1 associated disease or disorder or a pre-disposition to a HNMDA-1 associated disease or disorder, and/or recommending a particular treatment for the disease, disorder or pre-disease condition. The method may further comprise the step of receiving phenotypic information associated with the subject and/or acquiring from a network phenotypic information associated with the subject.

[2067] The present invention also provides in a network, a method for determining whether a subject has a HNMDA-1 associated disease or disorder or a pre-disposition to a HNMDA-1 associated disease or disorder associated with HNMDA-1, said method comprising the steps of receiving HNMDA-1 sequence information from the subject and/or information related thereto, receiving phenotypic information associated with the subject, acquiring information from the network corresponding to HNMDA-1 and/or a HNMDA-1 associated disease or disorder, and based on one or more of the phenotypic information, the HNMDA-1 information (e.g., sequence information and/or information related thereto), and the acquired information, determining whether the subject has a HNMDA-1 associated disease or disorder or a pre-disposition to a HNMDA-1 associated disease or disorder. The method may further comprise the step of recommending a particular treatment for the disease, disorder or pre-disease condition.

[2068] The present invention also provides a business method for determining whether a subject has a HNMDA-1 associated disease or disorder or a pre-disposition to a HNMDA-1 associated disease or disorder, said method comprising the steps of receiving information related to HNMDA-1 (e.g., sequence information and/or information related thereto), receiving phenotypic information associated with the subject, acquiring information from the network related to HNMDA-1 and/or related to a HNMDA-1 associated disease or disorder, and based on one or more of the phenotypic information, the HNMDA-1 information, and the acquired information, determining whether the subject has a HNMDA-1 associated disease or disorder or a pre-disposition to a HNMDA-1 associated disease or disorder. The method may further comprise the step of recommending a particular treatment for the disease, disorder or pre-disease condition.

[2069] The invention also includes an array comprising a HNMDA-1 sequence of the present invention. The array can be used to assay expression of one or more genes in the array. In one embodiment, the array can be used to assay gene expression in a tissue to ascertain tissue specificity of genes in the array. In this manner, up to about 7600 genes can be simultaneously assayed for expression, one of which can be HNMDA-1. This allows a profile to be developed showing a battery of genes specifically expressed in one or more tissues.

[2070] In addition to such qualitative determination, the invention allows the quantitation of gene expression. Thus, not only tissue specificity, but also the level of expression of a battery of genes in the tissue is ascertainable. Thus, genes can be grouped on the basis of their tissue expression per se and level of expression in that tissue. This is useful, for example, in ascertaining the relationship of gene expression between or among tissues. Thus, one tissue can be perturbed and the effect on gene expression in a second tissue can be determined. In this context, the effect of one cell type on another cell type in response to a biological stimulus can be determined. Such a determination is useful, for example, to know the effect of cell-cell interaction at the level of gene expression. If an agent is administered therapeutically to treat one cell type but has an undesirable effect on another cell type, the invention provides an assay to determine the molecular basis of the undesirable effect and thus provides the opportunity to co-administer a counteracting agent or otherwise treat the undesired effect. Similarly, even within a single cell type, undesirable biological effects can be determined at the molecular level. Thus, the effects of an agent on expression of other than the target gene can be ascertained and counteracted.

[2071] In another embodiment, the array can be used to monitor the time course of expression of one or more genes in the array. This can occur in various biological contexts, as disclosed herein, for example development of a HNMDA-1 associated disease or disorder, progression of HNMDA-1 associated disease or disorder, and processes, such a cellular transformation associated with the HNMDA-1 associated disease or disorder.

[2072] The array is also useful for ascertaining the effect of the expression of a gene on the expression of other genes in the same cell or in different cells (e.g., ascertaining the effect of HNMDA-1 expression on the expression of other genes). This provides, for example, for a selection of alternate molecular targets for therapeutic intervention if the ultimate or downstream target cannot be regulated.

[2073] The array is also useful for ascertaining differential expression patterns of one or more genes in normal and abnormal cells. This provides a battery of genes (e.g., including HNMDA-1) that could serve as a molecular target for diagnosis or therapeutic intervention.

[2074] This invention is further illustrated by the following examples which should not be construed as limiting. The contents of all references, patents and published patent applications cited throughout this application, as well as the Figures and the Sequence Listing, are incorporated herein by reference.

### EXAMPLES

### Example 1

### Identification and Characterization of Human HNMDA-1 cDNA

[2075] In this example, the identification and characterization of the gene encoding human HNMDA-1 (clone 55063) is described.

[2076] Isolation of the HNMDA-1 cDNA

[2077] The invention is based, at least in part, on the discovery of a human gene encoding a novel polypeptide, referred to herein as HNMDA-1. The entire sequence of the human clone 55063 was determined and found to contain an open reading frame termed human “HNMDA-1.” The nucleotide sequence of the HNMDA-1 gene is set forth in FIG. 32 and in the Sequence Listing as SEQ ID NO:37. The amino acid sequence of the HNMDA-1 expression product is set forth in FIG. 32 and in the Sequence Listing as SEQ ID NO:38. The HNMDA-1 polypeptide comprises 1115 amino acids. The coding region (open reading frame) of SEQ ID NO:37 is set forth as SEQ ID NO:39. Clone 55063, comprising the coding region of HNMDA-1, was deposited with the American Type Culture Collection (ATCC®), 10801 University Boulevard, Manassas, Va. 20110-2209, on ______, and assigned Accession No. ______.

[2078] Analysis of the Human HNMDA-1 Molecules

[2079] The HNMDA-1 amino acid sequence was aligned with the amino acid sequence of the rat NMDA-L (Accession No. 1050330) amino acid sequence using the CLUSTAL W (1.74) multiple sequence alignment program. The results of the alignment are set forth in FIG. 37.

[2080] A search using the polypeptide sequence of SEQ ID NO:38 was performed against the HMM database in PFAM (FIG. 34) resulting in the identification of a potential ligand-gated ion channel family domain in the amino acid sequence of HNMDA-1 at about residues 674-952 of SEQ ID NO:38 (score=198.1).

[2081] A search using the polypeptide sequence of SEQ ID NO:38 was also performed against the HMM database in SMART (FIGS. 35A-B) resulting in the identification of a potential glutamate-gated ion channel family domain in the amino acid sequence of HNMDA-1 at about residues 565-910 of SEQ ID NO:38 (score=267.4).

[2082] The amino acid sequence of HNMDA-1 was analyzed using the program PSORT (http://www.psort.nibb.ac.jp) to predict the localization of the proteins within the cell. This program assesses the presence of different targeting and localization amino acid sequences within the query sequence. The results of this analysis show that HNMDA-1 may be localized to the endoplasmic reticulum, mitochondria, or nucleus.

[2083] Searches of the amino acid sequence of HNMDA-1 were further performed against the Prosite database. These searches resulted in the identification in the amino acid sequence of HNMDA-1 of a number of potential N-glycosylation sites, a potential cAMP- and cGMP-dependent protein kinase phosphorylation site, a number of potential protein kinase C phosphorylation sites, a number of potential casein kinase II phosphorylation sites, a potential tyrosine kinase phosphorylation site, a number of potential N-myristoylation sites, a number of potential amidation sites, and a potential ATP/GTP-binding site motif A (P-loop).

[2084] A MEMSAT analysis of the polypeptide sequence of SEQ ID NO:38 was also performed predicting three possible transmembrane domains in the amino acid sequence of HNMDA-1 (SEQ ID NO:38) at about residues 677-695, 748-770, and 931-951 (FIG. 36). Further analysis of the amino acid sequence of SEQ ID NO:38 (e.g., alignment with, for example, a known rat NMDA protein) resulted in the identification of a fourth transmembrane domain at about amino acid residues 713-734 of SEQ ID NO:38.

### Example 2

### Expression of Recombinant Human HNMDA-1 Polypeptide in Bacterial Cells

[2085] In this example, human HNMDA-1 is expressed as a recombinant glutathione-S-transferase (GST) fusion polypeptide in E. coli and the fusion polypeptide is isolated and characterized. Specifically, HNMDA-1 is fused to GST and this fusion polypeptide is expressed in E. coli, e.g., strain PEB199. Expression of the GST-HNMDA-1 fusion polypeptide in PEB199 is induced with IPTG. The recombinant fusion polypeptide is purified from crude bacterial lysates of the induced PEB199 strain by affinity chromatography on glutathione beads. Using polyacrylamide gel electrophoretic analysis of the polypeptide purified from the bacterial lysates, the molecular weight of the resultant fusion polypeptide is determined.

### Example 3

### Expression of Recombinant Human HNMDA-1 Polypeptide in COS Cells

[2086] To express the human HNMDA-1 gene in COS cells, the pcDNA/Amp vector by Invitrogen Corporation (San Diego, Calif.) is used. This vector contains an SV40 origin of replication, an ampicillin resistance gene, an E. coli replication origin, a CMV promoter followed by a polylinker region, and an SV40 intron and polyadenylation site. A DNA fragment encoding the entire HNMDA-1 polypeptide and an HA tag (Wilson et al. (1984) Cell 37:767) or a FLAG tag fused in-frame to its 3′ end of the fragment is cloned into the polylinker region of the vector, thereby placing the expression of the recombinant polypeptide under the control of the CMV promoter.

[2087] To construct the plasmid, the HNMDA-1 DNA sequence is amplified by PCR using two primers. The 5′ primer contains the restriction site of interest followed by approximately twenty nucleotides of the HNMDA-1 coding sequence starting from the initiation codon; the 3′ end sequence contains complementary sequences to the other restriction site of interest, a translation stop codon, the HA tag or FLAG tag and the last 20 nucleotides of the HNMDA-1 coding sequence. The PCR amplified fragment and the pCDNA/Amp vector are digested with the appropriate restriction enzymes and the vector is dephosphorylated using the CIAP enzyme (New England Biolabs, Beverly, Mass.). Preferably the two restriction sites chosen are different so that the HNMDA-1 gene is inserted in the correct orientation. The ligation mixture is transformed into E. coli cells (strains HB101, DH5α, SURE, available from Stratagene Cloning Systems, La Jolla, Calif., can be used), the transformed culture is plated on ampicillin media plates, and resistant colonies are selected. Plasmid DNA is isolated from transformants and examined by restriction analysis for the presence of the correct fragment.

[2088] COS cells are subsequently transfected with the HNMDA-1-pcDNA/Amp plasmid DNA using the calcium phosphate or calcium chloride co-precipitation methods, DEAE-dextran-mediated transfection, lipofection, or electroporation. Other suitable methods for transfecting host cells can be found in Sambrook, J., Fritsh, E. F., and Maniatis, T. Molecular Cloning: A Laboratory Manual. 2nd, ed., Cold Spring Harbor Laboratory, Cold Spring Harbor Laboratory Press, Cold Spring Harbor, N.Y., 1989. The expression of the IC54420 polypeptide is detected by radiolabeling (³⁵S-methionine or ³⁵S-cysteine available from NEN, Boston, Mass., can be used) and immunoprecipitation (Harlow, E. and Lane, D. Antibodies: A Laboratory Manual, Cold Spring Harbor Laboratory Press, Cold Spring Harbor, N.Y., 1988) using an HA specific monoclonal antibody. Briefly, the cells are labeled for 8 hours with ³⁵S-methionine (or ³⁵S-cysteine). The culture media are then collected and the cells are lysed using detergents (RIPA buffer, 150 mM NaCl, 1% NP-40, 0.1% SDS, 0.5% DOC, 50 mM Tris, pH 7.5). Both the cell lysate and the culture media are precipitated with an HA specific monoclonal antibody. Precipitated polypeptides are then analyzed by SDS-PAGE.

[2089] Alternatively, DNA containing the HNMDA-1 coding sequence is cloned directly into the polylinker of the pCDNA/Amp vector using the appropriate restriction sites. The resulting plasmid is transfected into COS cells in the manner described above, and the expression of the HNMDA-1 polypeptide is detected by radiolabeling and immunoprecipitation using an HNMDA-1-specific monoclonal antibody.

### VIII. 56115, A NOVEL HUMAN TWIK POTASSIUM CHANNEL AND USES THEREFOR

### Background of the Invention

[2090] Potassium (K⁺) channels are ubiquitous proteins which are involved in the setting of the resting membrane potential as well as in the modulation of the electrical activity of cells. In excitable cells, K⁺ channels influence action potential waveforms, firing frequency, and neurotransmitter secretion (Rudy, B. (1988) Neuroscience, 25, 729-749; Hille, B. (1992) Ionic Channels of Excitable Membranes, 2nd Ed.). In non-excitable cells, they are involved in hormone secretion, cell volume regulation and potentially in cell proliferation and differentiation (Lewis et al. (1995) Annu. Rev. Immunol., 13, 623-653). Developments in electrophysiology have allowed the identification and the characterization of an astonishing variety of K⁺ channels that differ in their biophysical properties, pharmacology, regulation and tissue distribution (Rudy, B. (1988) Neuroscience, 25, 729-749; Hille, B. (1992) Ionic Channels of Excitable Membranes, 2nd Ed.). More recently, cloning efforts have shed considerable light on the mechanisms that determine this functional diversity. Furthermore, analyses of structure-function relationships have provided an important set of data concerning the molecular basis of the biophysical properties (selectivity, gating, assembly) and the pharmacological properties of cloned K⁺ channels.

[2091] Functional diversity of K⁺ channels arises mainly from the existence of a great number of genes coding for pore-forming subunits, as well as for other associated regulatory subunits. Two main structural families of pore-forming subunits have been identified. The first one consists of subunits with a conserved hydrophobic core containing six transmembrane domains (TMDs). These K⁺ channel α subunits participate in the formation of outward rectifier voltage-gated (Kv) and Ca²⁺-dependent K⁺ channels. The fourth TMD contains repeated positive charges involved in the voltage gating of these channels and hence in their outward rectification (Logothetis et al. (1992) Neuron, 8, 531-540; Bezanilla et al. (1994) Biophys. J. 66, 1011-1021).

[2092] The second family of pore-forming subunits have only two TMDs. They are essential subunits of inward-rectifying (IRK), G-protein-coupled (GIRK) and ATP-sensitive (K_{ATP}) K⁺ channels. The inward rectification results from a voltage-dependent block by cytoplasmic Mg²⁺ and polyamines (Matsuda, H. (1991) Annu. Rev. Physiol., 53, 289-298). A conserved domain, called the P domain, is present in all members of both families (Pongs, O. (1993) J. Membr. Biol., 136, 1-8; Heginbotham et al. (1994) Biophys. J. 66,1061-1067; Mackinnon, R. (1995) Neuron, 14, 889-892; Pascual et al., (1995) Neuron., and 14, 1055-1063). This domain is an essential element of the aqueous K⁺-selective pore. In both groups, the assembly of four subunits is necessary to form a functional K⁺ channel (Mackinnon, R. (1991) Nature, 350, 232-235; Yang et al., (1995) Neuron, 15, 1441-1447.

[2093] In both six TMD and two TMD pore-forming subunit families, different subunits coded by different genes can associate to form heterotetramers with new channel properties (Isacoff et al., (1990) Nature, 345, 530-534). A selective formation of heteropolymeric channels may allow each cell to develop the best K⁺ current repertoire suited to its function. Pore-forming α subunits of Kv channels are classified into different subfamilies according to their sequence similarity (Chandy et al. (1993) Trends Pharmacol. Sci., 14: 434). Tetramerization is believed to occur preferentially between members of each subgroup (Covarrubias et al. (1991) Neuron, 7, 763-773). The domain responsible for this selective association is localized in the N-terminal region and is conserved between members of the same subgroup. This domain is necessary for hetero- but not homo-multimeric assembly within a subfamily and prevents co-assembly between subfamilies. Recently, pore-forming subunits with two TMDs were also shown to co-assemble to form heteropolymers (Duprat et al. (1995) Biochem. Biophys. Res. Commun., 212, 657-663. This heteropolymerization seems necessary to give functional GIRKs. IRKs are active as homopolymers but also form heteropolymers.

[2094] New structural types of K⁺ channels were identified recently in both humans and yeast. These channels have two P domains in their functional subunit instead of only one (Ketchum et al. (1995) Nature, 376, 690-695; Lesage et al. (1996) J. Biol. Chem, 271, 4183-4187; Lesage et al. (1996) EMBO J., 15, 1004-1011; Reid et al. (1996) Receptors Channels 4, 51-62). The human channel called TWIK-1, has four TMDs. TWIK-1 is expressed widely in human tissues and is particularly abundant in the heart and the brain. TWIK-1 currents are time independent and inwardly rectifying. These properties suggest that TWIK-1 channels are involved in the control of the background K⁺ membrane conductance (Lesage et al. (1996) EMBO J., 15, 1004-1011).

### Summary of the Invention

[2095] The present invention is based, at least in part, on the discovery of novel members of the TWIK (for Tandem of P domains in a Weak Inward rectifying K⁺ channel)-like family of potassium channels, referred to herein as TWIK-9 nucleic acid and protein molecules. The TWIK-9 nucleic acid and protein molecules of the present invention are useful as targets for developing modulating agents to regulate a variety of cellular processes. Accordingly, in one aspect, this invention provides isolated nucleic acid molecules encoding TWIK-9 proteins or biologically active portions thereof, as well as nucleic acid fragments suitable as primers or hybridization probes for the detection of TWIK-9-encoding nucleic acids.

[2096] In one embodiment, the invention features an isolated nucleic acid molecule that includes the nucleotide sequence set forth in SEQ ID NO:40 or 42. In another embodiment, the invention features an isolated nucleic acid molecule that encodes a polypeptide including the amino acid sequence set forth in SEQ ID NO:41. In another embodiment, the invention features an isolated nucleic acid molecule that includes the nucleotide sequence contained in the plasmid deposited with ATCC® as Accession Number ______.

[2097] In still other embodiments, the invention features isolated nucleic acid molecules including nucleotide sequences that are substantially identical (e.g., 60% identical) to the nucleotide sequence set forth as SEQ ID NO:40 or 42. The invention further features isolated nucleic acid molecules including at least 30 contiguous nucleotides of the nucleotide sequence set forth as SEQ ID NO:40 or 42. In another embodiment, the invention features isolated nucleic acid molecules which encode a polypeptide including an amino acid sequence that is substantially identical (e.g., 60% identical) to the amino acid sequence set forth as SEQ ID NO:41. Also featured are nucleic acid molecules which encode allelic variants of the polypeptide having the amino acid sequence set forth as SEQ ID NO:41. In addition to isolated nucleic acid molecules encoding full-length polypeptides, the present invention also features nucleic acid molecules which encode fragments, for example, biologically active or antigenic fragments, of the full-length polypeptides of the present invention (e.g., fragments including at least 10 contiguous amino acid residues of the amino acid sequence of SEQ ID NO:41). In still other embodiments, the invention features nucleic acid molecules that are complementary to, antisense to, or hybridize under stringent conditions to the isolated nucleic acid molecules described herein.

[2098] In a related aspect, the invention provides vectors including the isolated nucleic acid molecules described herein (e.g., TWIK-9-encoding nucleic acid molecules). Such vectors can optionally include nucleotide sequences encoding heterologous polypeptides. Also featured are host cells including such vectors (e.g., host cells including vectors suitable for producing TWIK-9 nucleic acid molecules and polypeptides).

[2099] In another aspect, the invention features isolated TWIK-9 polypeptides and/or biologically active or antigenic fragments thereof. Exemplary embodiments feature a polypeptide including the amino acid sequence set forth as SEQ ID NO:41, a polypeptide including an amino acid sequence at least 60% identical to the amino acid sequence set forth as SEQ ID NO:41, a polypeptide encoded by a nucleic acid molecule including a nucleotide sequence at least 60% identical to the nucleotide sequence set forth as SEQ ID NO:40 or 42. Also featured are fragments of the full-length polypeptides described herein (e.g., fragments including at least 10 contiguous amino acid residues of the sequence set forth as SEQ ID NO:41) as well as allelic variants of the polypeptide having the amino acid sequence set forth as SEQ ID NO:41.

[2100] The TWIK-9 polypeptides and/or biologically active or antigenic fragments thereof, are useful, for example, as reagents or targets in assays applicable to treatment and/or diagnosis of TWIK-9 mediated or potassium channel related disorders. In one embodiment, a TWIK-9 polypeptide or fragment thereof has a TWIK-9 activity. In another embodiment, a TWIK-9 polypeptide or fragment thereof has at least one or more of the following domains: at least one, preferably two, three or four transmembrane domains, at least one, preferably two pore loops (P-loops), and optionally, has a TWIK-9 activity. In a related aspect, the invention features antibodies (e.g., antibodies which specifically bind to any one of the polypeptides, as described herein) as well as fusion polypeptides including all or a fragment of a polypeptide described herein.

[2101] The present invention further features methods for detecting TWIK-9 polypeptides and/or TWIK-9 nucleic acid molecules, such methods featuring, for example, a probe, primer or antibody described herein. Also featured are kits for the detection of TWIK-9 polypeptides and/or TWIK-9 nucleic acid molecules. In a related aspect, the invention features methods for identifying compounds which bind to and/or modulate the activity of a TWIK-9 polypeptide or TWIK-9 nucleic acid molecule described herein. Also featured are methods for modulating a TWIK-9 activity.

[2102] Other features and advantages of the invention will be apparent from the following detailed description and claims.

### Detailed Description of the Invention

[2103] The present invention is based, at least in part, on the discovery of novel molecules, referred to herein as TWIK-9 nucleic acid and protein molecules, which are novel members of the TWIK (for Tandem of P domains in a Weak Inward rectifying K⁺ channel)-like family of potassium channels. These novel molecules are capable of, for example, modulating a potassium channel mediated activity in a cell, e.g., a neuronal cell.

[2104] As used herein, a “potassium channel” includes a protein or polypeptide which is involved in receiving, conducting, and transmitting signals in an electrically excitable cell, e.g., a neuronal cell, or a muscle cell (e.g., a cardiac muscle cell). Potassium channels are potassium ion selective, and can determine membrane excitability (the ability of, for example, a neuron to respond to a stimulus and convert it into an impulse). Potassium channels can also influence the resting potential of membranes, wave forms and frequencies of action potentials, and thresholds of excitation. Potassium channels are typically expressed in electrically excitable cells, e.g., neurons, muscle, endocrine, and egg cells, and may form heteromultimeric structures, e.g., composed of pore-forming α and cytoplasmic β subunits. Potassium channels may also be found in non-excitable cells (e.g., spleen cells or prostate cells), where they may play a role in, e.g., signal transduction. Examples of potassium channels include: (1) the voltage-gated potassium channels, (2) the ligand-gated potassium channels, e.g., neurotransmitter-gated potassium channels, and (3) cyclic-nucleotide-gated potassium channels. Voltage-gated and ligand-gated potassium channels are expressed in the brain, e.g., in brainstem monoaminergic and forebrain cholinergic neurons, where they are involved in the release of neurotransmitters, or in the dendrites of hippocampal and neocortical pyramidal cells, where they are involved in the processes of learning and memory formation. For a detailed description of potassium channels, see Kandel E. R.. et al., Principles of Neural Science, second edition, (Elsevier Science Publishing Co., Inc., N.Y. (1985)), the contents of which are incorporated herein by reference. As the TWIK-like proteins of the present invention may modulate potassium channel mediated activities, they may be useful for developing novel diagnostic and therapeutic agents for potassium channel associated disorders.

[2105] As used herein, a “potassium channel mediated activity” includes an activity which involves a potassium channel, e.g., a potassium channel in a neuronal cell, or a muscle cell (e.g., a cardiac muscle cell), associated with receiving, conducting, and transmitting signals in, for example, the nervous system. Potassium channel mediated activities include release of neurotransmitters, e.g., dopamine or norepinephrine, from cells, e.g., neuronal cells; modulation of resting potential of membranes, wave forms and frequencies of action potentials, and thresholds of excitation; and modulation of processes such as integration of sub-threshold synaptic responses, the conductance of back-propagating action potentials in, for example, neuronal cells or muscle cells, participation in signal transduction pathways, and participation in nociception.

[2106] As used herein, a “potassium channel associated disorder” includes a disorder, disease or condition which is characterized by a misregulation of a potassium channel mediated activity. Potassium channel associated disorders can detrimentally affect conveyance of sensory impulses from the periphery to the brain and/or conductance of motor impulses from the brain to the periphery; integration of reflexes; interpretation of sensory impulses; and emotional, intellectual (e.g., learning and memory), or motor processes.

[2107] Examples of potassium channel associated disorders include central nervous system (CNS) disorders such as cognitive and neurodegenerative disorders, examples of which include, but are not limited to, Alzheimer's disease, dementias related to Alzheimer's disease (such as Pick's disease), Parkinson's and other Lewy diffuse body diseases, senile dementia, Huntington's disease, Gilles de la Tourette's syndrome, multiple sclerosis, amyotrophic lateral sclerosis, movement disorders, progressive supranuclear palsy, epilepsy, AIDS related dementia, and Jakob-Creutzfieldt disease; autonomic function disorders such as hypertension and sleep disorders, and neuropsychiatric disorders, such as depression, schizophrenia, schizoaffective disorder, korsakoff's psychosis, mania, anxiety disorders, or phobic disorders; learning or memory disorders, e.g., amnesia or age-related memory loss, attention deficit disorder, dysthymic disorder, major depressive disorder, mania, obsessive-compulsive disorder, psychoactive substance use disorders, anxiety, phobias, panic disorder, as well as bipolar affective disorder, e.g., severe bipolar affective (mood) disorder (BP-1), and bipolar affective neurological disorders, e.g., migraine and obesity. Further CNS-related disorders include, for example, those listed in the American Psychiatric Association's Diagnostic and Statistical manual of Mental Disorders (DSM), the most current version of which is incorporated herein by reference in its entirety.

[2108] Further examples of potassium channel associated disorders include cardiac-related disorders. Cardiovascular system disorders in which the TWIK-9 molecules of the invention may be directly or indirectly involved include arteriosclerosis, ischemia reperfusion injury, restenosis, arterial inflammation, vascular wall remodeling, ventricular remodeling, rapid ventricular pacing, coronary microembolism, tachycardia, bradycardia, pressure overload, aortic bending, coronary artery ligation, vascular heart disease, atrial fibrilation, Jervell syndrome, Lange-Nielsen syndrome, long-QT syndrome, congestive heart failure, sinus node dysfunction, angina, heart failure, hypertension, atrial fibrillation, atrial flutter, dilated cardiomyopathy, idiopathic cardiomyopathy, myocardial infarction, coronary artery disease, cerebral ischemia, stroke, coronary artery spasm, and arrhythmia. TWIK-9-mediated or related disorders also include disorders of the musculoskeletal system such as paralysis and muscle weakness, e.g., ataxia, myotonia, and myokymia.

[2109] Further disorders in which the TWIK-9 molecules of the invention may be involved are pain disorders. Pain disorders include those that affect pain signaling mechanisms. As used herein, the term “pain signaling mechanisms” includes the cellular mechanisms involved in the development and regulation of pain, e.g., pain elicited by noxious chemical, mechanical, or thermal stimuli, in a subject, e.g., a mammal such as a human. In mammals, the initial detection of noxious chemical, mechanical, or thermal stimuli, a process referred to as “nociception”, occurs predominantly at the peripheral terminals of specialized, small diameter sensory neurons. These sensory neurons transmit the information to the central nervous system, evoking a perception of pain or discomfort and initiating appropriate protective reflexes. The TWIK-9 molecules of the present invention may be present on these sensory neurons and, thus, may be involved in detecting these noxious chemical, mechanical, or thermal stimuli and transducing this information into membrane depolarization events. Thus, the TWIK-9 molecules by participating in pain signaling mechanisms, may modulate pain elicitation and act as targets for developing novel diagnostic targets and therapeutic agents to control pain. Examples of pain disorders include headache (e.g., tension headache or migraine), back pain, cancer pain, arthritis pain, or neurogenic pain.

[2110] Potassium channel disorders also include cellular proliferation, growth, differentiation, or migration disorders. Cellular proliferation, growth, differentiation, or migration disorders include those disorders that affect cell proliferation, growth, differentiation, or migration processes. As used herein, a “cellular proliferation, growth, differentiation, or migration process” is a process by which a cell increases in number, size or content, by which a cell develops a specialized set of characteristics which differ from that of other cells, or by which a cell moves closer to or further from a particular location or stimulus. The TWIK-9 molecules of the present invention are involved in signal transduction mechanisms, which are known to be involved in cellular growth, differentiation, and migration processes. Thus, the TWIK-9 molecules may modulate cellular growth, differentiation, or migration, and may play a role in disorders characterized by aberrantly regulated growth, differentiation, or migration. Such disorders include cancer, e.g., carcinoma, sarcoma, lymphoma or leukemia, examples of which include, but are not limited to, breast, endometrial, ovarian, uterine, hepatic, gastrointestinal, prostate, colorectal, and lung cancer, melanoma, neurofibromatosis, adenomatous polyposis of the colon, Wilms' tumor, nephroblastoma, teratoma, rhabdomyosarcoma; tumor invasion, angiogenesis and metastasis; skeletal dysplasia; neuronal deficiencies resulting from impaired neural induction and patterning; and hematopoietic and/or myeloproliferative disorders.

[2111] TWIK-9-associated or related disorders also include disorders of tissues in which TWIK-9 protein is predominantly expressed, e.g., dorsal root ganglia, cerebellum, testes, mammary gland, fetal brain and fetal thymus.

[2112] The term “family” when referring to the protein and nucleic acid molecules of the invention is intended to mean two or more proteins or nucleic acid molecules having a common structural domain or motif and having sufficient amino acid or nucleotide sequence homology as defined herein. Such family members can be naturally or non-naturally occurring and can be from either the same or different species. For example, a family can contain a first protein of human origin as well as other distinct proteins of human origin or alternatively, can contain homologues of non-human origin, e.g., rat or mouse proteins. Members of a family can also have common functional characteristics.

[2113] For example, the family of TWIK-9 proteins comprises at least one “transmembrane domain” and preferably two, three, or four transmembrane domains. As used herein, the term “transmembrane domain” includes an amino acid sequence of about 15 amino acid residues in length which spans the plasma membrane. More preferably, a transmembrane domain includes about at least 20, 25, 30, 35, 40, or 45 amino acid residues and spans the plasma membrane. Transmembrane domains are rich in hydrophobic residues, and typically have an alpha-helical structure. In a preferred embodiment, at least 50%, 60%, 70%, 80%, 90%, 95% or more of the amino acids of a transmembrane domain are hydrophobic, e.g., leucines, isoleucines, tyrosines, or tryptophans. Transmembrane domains are described in, for example, Zagotta W. N. et al. (1996) Annual Rev. Neurosci. 19: 235-263, the contents of which are incorporated herein by reference. Amino acid residues 9-26, 108-125, 159-178 and 219-243 of the TWIK-9 protein are predicted to comprise transmembrane domains.

[2114] In another embodiment, a TWIK-9 molecule of the present invention is identified based on the presence of at least one, preferably two pore loops (P-loops). As used herein, the term “pore loop” or “P-loop” includes an amino acid sequence of about 15-45 amino acid residues in length, preferably about 15-35 amino acid residues in length, and most preferably about 15-25 amino acid residues in length, which is involved in lining the potassium channel pore. A P-loop is typically found between transmembrane domains of potassium channels and is believed to be a major determinant of ion selectivity in potassium channels. Preferably, P-loops contain a G-[HYDROPHOBIC AMINO ACID]-G sequence, e.g., a GYG, GLG, or GFG sequence. P-loops are described in, for example, Warmke et al. (1991) Science 252:1560-1562; Zagotta W. N. et al., (1996) Annual Rev. Neurosci. 19:235-63 (Pongs, O. (1993) J. Membr. Biol., 136, 1-8; Heginbotham et al. (1994) Biophys. J. 66,1061-1067; Mackinnon, R. (1995) Neuron, and 14, 889-892; Pascual et al., (1995) Neuron., 14, 1055-1063), the contents of which are incorporated herein by reference. Amino acid residues 80-97 and 190-208 of the human TWIK-9 protein comprise a P-loop.

[2115] In another embodiment, a TWIK-9 molecule of the present invention is identified based on a high scoring match with a TWIK channel Hidden Markov Model (i.e., a score of greater than 100, greater than 200, greater than 300, greater than 400 or greater than 500). To identify a high scoring match between a protein of interest and a TWIK channel HMM, the amino acid sequence of the protein is searched against a database of known HMMs (e.g., the Washington University HMM database). The TWIK channel (HMM) has been assigned the PFAM Accession PF02034 (http://genome.wustl.edu/Pfam/html). A search was performed against the HMM database resulting in a high scoring match between SEQ ID NO:41 and the TWIK channel HMM, e.g., a match having a score of greater than 587. The results of the search are set forth in FIG. 40.

[2116] In a preferred embodiment, the TWIK-9 molecules of the invention include at least one and, preferably, two, three, or four transmembrane domains, and at least one, preferably two P loops. In another preferred embodiment, the TWIK-9 molecules of the invention include at least one and, preferably, two, three, or four transmembrane domains, and at least one, preferably two P loops, and have a high scoring match with a TWIK channel HMM.

[2117] A description of the Pfam database can be found in Sonhammer et al. (1997) Proteins 28:405-420, and a detailed description of HMMs can be found, for example, in Gribskov et al.(1990) Meth. Enzymol. 183:146-159; Gribskov et al. (1987) Proc. Natl. Acad. Sci. USA 84:4355-4358; Krogh et al.(1994) J. Mol. Biol. 235:1501-1531; and Stultz et al.(1993) Protein Sci. 2:305-314, the contents of which are incorporated herein by reference.

[2118] The signature patterns or consensus patterns described herein are described according to the following designation: all amino acids are indicated according to their universal single letter designation; “x” designates any amino acid; x(n) designates n number of amino acids, e.g., x (2) designates any two amino acids, e.g., x (1-3) designates any of one to three amino acids; and, amino acids in brackets indicates any one of the amino acids within the brackets, e.g., [RK] indicates any of one of either R (arginine) or K (lysine).

[2119] Isolated proteins of the present invention, preferably TWIK-9 proteins, have an amino acid sequence sufficiently homologous to the amino acid sequence of SEQ ID NO:41, or are encoded by a nucleotide sequence sufficiently homologous to SEQ ID NO:40 or 42. As used herein, the term “sufficiently homologous” refers to a first amino acid or nucleotide sequence which contains a sufficient or minimum number of identical or equivalent (e.g., an amino acid residue which has a similar side chain) amino acid residues or nucleotides to a second amino acid or nucleotide sequence such that the first and second amino acid or nucleotide sequences share common structural domains or motifs and/or a common functional activity. For example, amino acid or nucleotide sequences which share common structural domains having at least 50%, 55%, 60%, 65%, 70%, 75%, 80%, 85%, 90%, 91%, 92%, 93%, 94%, 95%, 96%, 97%, 98%, 99% or more homology or identity across the amino acid sequences of the domains and contain at least one and preferably two structural domains or motifs, are defined herein as sufficiently homologous. Furthermore, amino acid or nucleotide sequences which share at least 50%, 55%, 60%, 65%, 70%, 75%, 80%, 85%, 90%, 91%, 92%, 93%, 94%, 95%, 96%, 97%, 98%, 99% or more homology or identity and share a common functional activity are defined herein as sufficiently homologous.

[2120] In a preferred embodiment, a TWIK-9 protein includes at least one, preferably two, three, or four transmembrane domains, and at least one, preferably two pore loops (P-loops), and has an amino acid sequence at least about 50%, 55%, 60%, 65%, 70%, 75%, 80%, 85%, 85%, 90%, 95%, 96%, 97%, 98%, 99% or more homologous or identical to the amino acid sequence of SEQ ID NO:41, or the amino acid sequence encoded by the DNA insert of the plasmid deposited with ATCC as Accession Number ______. In yet another preferred embodiment, a TWIK-9 protein includes at least one, preferably two, three, or four transmembrane domains, and at least one, preferably two pore loops (P-loops), and is encoded by a nucleic acid molecule having a nucleotide sequence which hybridizes under stringent hybridization conditions to a complement of a nucleic acid molecule comprising the nucleotide sequence of SEQ ID NO:40 or 42. In another preferred embodiment, a TWIK-9 protein includes at least one, preferably two, three, or four transmembrane domains, and at least one, preferably two pore loops (P-loops), and has a TWIK-9 activity.

[2121] As used interchangeably herein, a “TWIK-9 activity”, “biological activity of TWIK-9” or “functional activity of TWIK-9”, includes an activity exerted or mediated by a TWIK-9 protein, polypeptide or nucleic acid molecule on a TWIK-9 responsive cell or tissue, or on a TWIK-9 substrate, as determined in vivo or in vitro, according to standard techniques. In one embodiment, a TWIK-9 activity is a direct activity, such as an association with a TWIK-9 target molecule. As used herein, a “target molecule” or “binding partner” is a molecule with which a TWIK-9 protein binds or interacts in nature, such that TWIK-9-mediated function is achieved. A TWIK-9 target molecule can be a non-TWIK-9 molecule or a TWIK-9 protein or polypeptide of the present invention. In an exemplary embodiment, a TWIK-9 target molecule is a TWIK-9 ligand, e.g., a potassium channel pore forming subunit or a potassium channel ligand. A TWIK-9 activity can also be an indirect activity, such as a cellular signaling activity mediated by interaction of the TWIK-9 protein with a TWIK-9 ligand or substrate. The biological activities of TWIK-9 are described herein.

[2122] For example, the TWIK-9 proteins of the present invention can have one or more of the following activities: (1) interacting with a non-TWIK protein molecule; (2) activating a TWIK-dependent signal transduction pathway; (3) modulating the release of neurotransmitters; (4) modulating membrane excitability; (5) influencing the resting potential of membranes, wave forms and frequencies of action potentials, and thresholds of excitation, (6) modulating processes which underlie learning and memory, such as integration of sub-threshold synaptic responses and the conductance of back-propagating action potentials, and (7) mediating nociception.

[2123] The nucleotide sequence of the isolated human TWIK-9 cDNA and the predicted amino acid sequence encoded by the TWIK-9 cDNA are shown in FIG. 38 and in SEQ ID NOs:40 and 41, respectively. A plasmid containing the human TWIK-9 cDNA was deposited with the American Type Culture Collection (ATCC), 10801 University Boulevard, Manassas, Va. 20110-2209, on ______ and assigned Accession Number ______. This deposit will be maintained under the terms of the Budapest Treaty on the International Recognition of the Deposit of Microorganisms for the Purposes of Patent Procedure. This deposit were made merely as a convenience for those of skill in the art and is not an admission that a deposit is required under 35 U.S.C. §112.

[2124] The human TWIK-9 gene, which is approximately 1262 nucleotides in length, encodes a protein having a molecular weight of approximately 41 kD and which is approximately 374 amino acid residues in length.

[2125] Various aspects of the invention are described in further detail in the following subsections:

[2126] I. Isolated Nucleic Acid Molecules

[2127] One aspect of the invention pertains to isolated nucleic acid molecules that encode TWIK-9 proteins or biologically active portions thereof, as well as nucleic acid fragments sufficient for use as hybridization probes to identify TWIK-9-encoding nucleic acid molecules (e.g, TWIK-9 mRNA) and fragments for use as PCR primers for the amplification or mutation of TWIK-9 nucleic acid molecules. As used herein, the term “nucleic acid molecule” is intended to include DNA molecules (e.g., cDNA or genomic DNA) and RNA molecules (e.g., mRNA) and analogs of the DNA or RNA generated using nucleotide analogs. The nucleic acid molecule can be single-stranded or double-stranded, but preferably is double-stranded DNA.

[2128] The term “isolated nucleic acid molecule” includes nucleic acid molecules which are separated from other nucleic acid molecules which are present in the natural source of the nucleic acid. For example, with regards to genomic DNA, the term “isolated” includes nucleic acid molecules which are separated from the chromosome with which the genomic DNA is naturally associated. Preferably, an “isolated” nucleic acid is free of sequences which naturally flank the nucleic acid (i.e., sequences located at the 5′ and 3′ ends of the nucleic acid) in the genomic DNA of the organism from which the nucleic acid is derived. For example, in various embodiments, the isolated TWIK-9 nucleic acid molecule can contain less than about 5 kb, 4 kb, 3 kb, 2 kb, 1 kb, 0.5 kb or 0.1 kb of nucleotide sequences which naturally flank the nucleic acid molecule in genomic DNA of the cell from which the nucleic acid is derived. Moreover, an “isolated” nucleic acid molecule, such as a cDNA molecule, can be substantially free of other cellular material, or culture medium when produced by recombinant techniques, or substantially free of chemical precursors or other chemicals when chemically synthesized.

[2129] A nucleic acid molecule of the present invention, e.g., a nucleic acid molecule having the nucleotide sequence of SEQ ID NO:40 or 42, or the nucleotide sequence of the DNA insert of the plasmid deposited with ATCC as Accession Number ______, or a portion thereof, can be isolated using standard molecular biology techniques and the sequence information provided herein. Using all or a portion of the nucleic acid sequence of SEQ ID NO:40 or 42, or the nucleotide sequence of the DNA insert of the plasmid deposited with ATCC as Accession Number ______, as hybridization probes, TWIK-9 nucleic acid molecules can be isolated using standard hybridization and cloning techniques (e.g., as described in Sambrook, J., Fritsh, E. F., and Maniatis, T. Molecular Cloning: A Laboratory Manual. 2^{nd}, ed., Cold Spring Harbor Laboratory, Cold Spring Harbor Laboratory Press, Cold Spring Harbor, N.Y., 1989).

[2130] Moreover, a nucleic acid molecule encompassing all or a portion of SEQ ID NO:40 or 42, or the nucleotide sequence of the DNA insert of the plasmid deposited with ATCC as Accession Number ______ can be isolated by the polymerase chain reaction (PCR) using synthetic oligonucleotide primers designed based upon the sequence of SEQ ID NO:40 or 42, or the nucleotide sequence of the DNA insert of the plasmid deposited with ATCC as Accession Number ______.

[2131] A nucleic acid of the invention can be amplified using cDNA, mRNA or alternatively, genomic DNA, as a template and appropriate oligonucleotide primers according to standard PCR amplification techniques. The nucleic acid so amplified can be cloned into an appropriate vector and characterized by DNA sequence analysis. Furthermore, oligonucleotides corresponding to TWIK-9 nucleotide sequences can be prepared by standard synthetic techniques, e.g., using an automated DNA synthesizer.

[2132] In one embodiment, an isolated nucleic acid molecule of the invention comprises the nucleotide sequence shown in SEQ ID NO:40 or 42. This cDNA may comprise sequences encoding the human TWIK-9 protein (e.g., the “coding region”, from nucleotides 15-1139), as well as 5′ untranslated sequence (nucleotides 1-14) and 3′ untranslated sequences (nucleotides 1140-1262) of SEQ ID NO:40. Alternatively, the nucleic acid molecule can comprise only the coding region of SEQ ID NO:40 (e.g., nucleotides 15-1139, corresponding to SEQ ID NO:42). Accordingly, in another embodiment, an isolated nucleic acid molecule of the invention comprises SEQ ID NO:42 and nucleotides 1-14 of SEQ ID NO:40. In yet another embodiment, the isolated nucleic acid molecule comprises SEQ ID NO:42 and nucleotides 1140-1262 of SEQ ID NO:40. In yet another embodiment, the nucleic acid molecule consists of the nucleotide sequence set forth as SEQ ID NO:40 or 42.

[2133] In still another embodiment, an isolated nucleic acid molecule of the invention comprises a nucleic acid molecule which is a complement of the nucleotide sequence shown in SEQ ID NO:40 or 42, or the nucleotide sequence of the DNA insert of the plasmid deposited with ATCC as Accession Number ______, or a portion of any of these nucleotide sequences. A nucleic acid molecule which is complementary to the nucleotide sequence shown in SEQ ID NO:40 or 42, or the nucleotide sequence of the DNA insert of the plasmid deposited with ATCC as Accession Number ______, is one which is sufficiently complementary to the nucleotide sequence shown in SEQ ID NO:40 or 42, or the nucleotide sequence of the DNA insert of the plasmid deposited with ATCC as Accession Number ______, such that it can hybridize to the nucleotide sequence shown in SEQ ID NO:40 or 42, or the nucleotide sequence of the DNA insert of the plasmid deposited with ATCC as Accession Number ______, thereby forming a stable duplex.

[2134] In still another embodiment, an isolated nucleic acid molecule of the present invention comprises a nucleotide sequence which is at least about 50%, 55%, 60%, 65%, 70%, 75%, 80%, 85%, 90%, 91%, 92%, 93%, 94%, 95%, 96%, 97%, 98%, 99% or more identical to the nucleotide sequence shown in SEQ ID NO:40 or 42 (e.g., to the entire length of the nucleotide sequence), or to the nucleotide sequence (e.g., the entire length of the nucleotide sequence) of the DNA insert of the plasmid deposited with ATCC as Accession Number ______, or a portion or complement of any of these nucleotide sequences. In one embodiment, a nucleic acid molecule of the present invention comprises a nucleotide sequence which is at least (or no greater than) 50-100, 100-200, 200-300, 305, 305-400, 400-500, 500-600, 600-700, 700-800, 800-900, 900-1000, 1000-1100, 1000-1200 or more nucleotides in length and hybridizes under stringent hybridization conditions to a complement of a nucleic acid molecule of SEQ ID NO:40 or 42, or the nucleotide sequence of the DNA insert of the plasmid deposited with ATCC as Accession Number ______.

[2135] Moreover, the nucleic acid molecule of the invention can comprise only a portion of the nucleic acid sequence of SEQ ID NO:40 or 42, or the nucleotide sequence of the DNA insert of the plasmid deposited with ATCC as Accession Number ______, for example, a fragment which can be used as a probe or primer or a fragment encoding a portion of a TWIK-9 protein, e.g., a biologically active portion of a TWIK-9 protein. The nucleotide sequence determined from the cloning of the TWIK-9 gene allows for the generation of probes and primers designed for use in identifying and/or cloning other TWIK-9 family members, as well as TWIK-9 homologues from other species. The probe/primer (e.g., oligonucleotide) typically comprises substantially purified oligonucleotide. The oligonucleotide typically comprises a region of nucleotide sequence that hybridizes under stringent conditions to at least about 12 or 15, preferably about 20 or 25, more preferably about 30, 35, 40, 45, 50, 55, 60, 65, or 75 consecutive nucleotides of a sense sequence of SEQ ID NO:40 or 42, or the nucleotide sequence of the DNA insert of the plasmid deposited with ATCC as Accession Number ______, of an anti-sense sequence of SEQ ID NO:40 or 42, or the nucleotide sequence of the DNA insert of the plasmid deposited with ATCC as Accession Number _______, or of a naturally occurring allelic variant or mutant of SEQ ID NO:40 or 42, or the nucleotide sequence of the DNA insert of the plasmid deposited with ATCC as Accession Number ______.

[2136] Exemplary probes or primers are at least (or no greater than) 12 or 15, 20 or 25, 30, 35, 40, 45, 50, 55, 60, 65, 70, 75 or more nucleotides in length and/or comprise consecutive nucleotides of an isolated nucleic acid molecule described herein. Also included within the scope of the present invention are probes or primers comprising contiguous or consecutive nucleotides of an isolated nucleic acid molecule described herein, but for the difference of 1, 2, 3, 4, 5, 6, 7, 8, 9 or 10 bases within the probe or primer sequence. Probes based on the TWIK-9 nucleotide sequences can be used to detect (e.g., specifically detect) transcripts or genomic sequences encoding the same or homologous proteins. In preferred embodiments, the probe further comprises a label group attached thereto, e.g., the label group can be a radioisotope, a fluorescent compound, an enzyme, or an enzyme co-factor. In another embodiment a set of primers is provided, e.g., primers suitable for use in a PCR, which can be used to amplify a selected region of a TWIK-9 sequence, e.g., a domain, region, site or other sequence described herein. The primers should be at least 5, 10, or 50 base pairs in length and less than 100, or less than 200, base pairs in length. The primers should be identical, or differ by no greater than 1, 2, 3, 4, 5, 6, 7, 8, 9 or 10 bases when compared to a sequence disclosed herein or to the sequence of a naturally occurring variant. Such probes can be used as a part of a diagnostic test kit for identifying cells or tissue which misexpress a TWIK-9 protein, such as by measuring a level of a TWIK-9-encoding nucleic acid in a sample of cells from a subject, e.g., detecting TWIK-9 mRNA levels or determining whether a genomic TWIK-9 gene has been mutated or deleted.

[2137] A nucleic acid fragment encoding a “biologically active portion of a TWIK-9 protein” can be prepared by isolating a portion of the nucleotide sequence of SEQ ID NO:40 or 42, or the nucleotide sequence of the DNA insert of the plasmid deposited with ATCC as Accession Number ______, which encodes a polypeptide having a TWIK-9 biological activity (the biological activities of the TWIK-9 proteins are described herein), expressing the encoded portion of the TWIK-9 protein (e.g., by recombinant expression in vitro) and assessing the activity of the encoded portion of the TWIK-9 protein. In an exemplary embodiment, the nucleic acid molecule is at least 50-100, 100-200, 200-300, 305, 305-400, 400-500, 500-600, 600-700, 700-800, 800-900, 900-1000, 1000-1100, 1000-1200 or more nucleotides in length and encodes a protein having a TWIK-9 activity (as described herein).

[2138] The invention further encompasses nucleic acid molecules that differ from the nucleotide sequence shown in SEQ ID NO:40 or 42, or the nucleotide sequence of the DNA insert of the plasmid deposited with ATCC as Accession Number ______, due to degeneracy of the genetic code and thus encode the same TWIK-9 proteins as those encoded by the nucleotide sequence shown in SEQ ID NO:40 or 42, or the nucleotide sequence of the DNA insert of the plasmid deposited with ATCC as Accession Number ______. In another embodiment, an isolated nucleic acid molecule of the invention has a nucleotide sequence encoding a protein having an amino acid sequence which differs by at least 1, but no greater than 5, 10, 20, 50 or 100 amino acid residues from the amino acid sequence shown in SEQ ID NO:41, or the amino acid sequence encoded by the DNA insert of the plasmid deposited with the ATCC as Accession Number ______. In yet another embodiment, the nucleic acid molecule encodes the amino acid sequence of human TWIK-9. If an alignment is needed for this comparison, the sequences should be aligned for maximum homology.

[2139] Nucleic acid variants can be naturally occurring, such as allelic variants (same locus), homologues (different locus), and orthologues (different organism) or can be non naturally occurring. Non-naturally occurring variants can be made by mutagenesis techniques, including those applied to polynucleotides, cells, or organisms. The variants can contain nucleotide substitutions, deletions, inversions and insertions. Variation can occur in either or both the coding and non-coding regions. The variations can produce both conservative and non-conservative amino acid substitutions (as compared in the encoded product).

[2140] Allelic variants result, for example, from DNA sequence polymorphisms within a population (e.g., the human population) that lead to changes in the amino acid sequences of the TWIK-9 proteins. Such genetic polymorphism in the TWIK-9 genes may exist among individuals within a population due to natural allelic variation. As used herein, the terms “gene” and “recombinant gene” refer to nucleic acid molecules which include an open reading frame encoding a TWIK-9 protein, preferably a mammalian TWIK-9 protein, and can further include non-coding regulatory sequences, and introns.

[2141] Accordingly, in one embodiment, the invention features isolated nucleic acid molecules which encode a naturally occurring allelic variant of a polypeptide comprising the amino acid sequence of SEQ ID NO:41, or an amino acid sequence encoded by the DNA insert of the plasmid deposited with ATCC as Accession Number ______, wherein the nucleic acid molecule hybridizes to a complement of a nucleic acid molecule comprising SEQ ID NO:40 or 42, for example, under stringent hybridization conditions.

[2142] Allelic variants of TWIK-9, e.g., human TWIK-9, include both functional and non-functional TWIK-9 proteins. Functional allelic variants are naturally occurring amino acid sequence variants of the TWIK-9 protein that maintain the ability, for example, to bind a TWIK-9 ligand or substrate, and/or modulate pain signaling mechanisms, membrane excitability or neurotransmitter release. Functional allelic variants will typically contain only conservative substitution of one or more amino acids of SEQ ID NO:41, or substitution, deletion or insertion of non-critical residues in non-critical regions of the protein.

[2143] Non-functional allelic variants are naturally occurring amino acid sequence variants of the TWIK-9 protein, e.g., human TWIK-9, that do not have the ability to either bind or interact with a TWIK-9 ligand or substrate, and/or modulate any of the TWIK-9 activities described herein. Non-functional allelic variants will typically contain a non-conservative substitution, a deletion, or insertion, or premature truncation of the amino acid sequence of SEQ ID NO:41, or a substitution, insertion, or deletion in critical residues or critical regions of the protein.

[2144] The present invention further provides non-human orthologues (e.g., non-human orthologues of the human TWIK-9 protein). Orthologues of the human TWIK-9 protein are proteins that are isolated from non-human organisms and possess, for example, the same TWIK-9 ligand or substrate binding, and/or modulation of pain signaling mechanisms, membrane excitability or neurotransmitter release activities of the human TWIK-9 protein. Orthologues of the human TWIK-9 protein can readily be identified as comprising an amino acid sequence that is substantially homologous to SEQ ID NO:41.

[2145] Moreover, nucleic acid molecules encoding other TWIK-9 family members and, thus, which have a nucleotide sequence which differs from the TWIK-9 sequences of SEQ ID NO:40 or 42, or the nucleotide sequence of the DNA insert of the plasmid deposited with ATCC as Accession Number ______ are intended to be within the scope of the invention. For example, another TWIK-9 cDNA can be identified based on the nucleotide sequence of human TWIK-9. Moreover, nucleic acid molecules encoding TWIK-9 proteins from different species, and which, thus, have a nucleotide sequence which differs from the TWIK-9 sequences of SEQ ID NO:40 or 42, or the nucleotide sequence of the DNA insert of the plasmid deposited with ATCC as Accession Number ______ are intended to be within the scope of the invention. For example, a mouse or monkey TWIK-9 cDNA can be identified based on the nucleotide sequence of a human TWIK-9.

[2146] Nucleic acid molecules corresponding to natural allelic variants and homologues of the TWIK-9 cDNAs of the invention can be isolated based on their homology to the TWIK-9 nucleic acids disclosed herein using the cDNAs disclosed herein, or a portion thereof, as a hybridization probe according to standard hybridization techniques under stringent hybridization conditions. Nucleic acid molecules corresponding to natural allelic variants and homologues of the TWIK-9 cDNAs of the invention can further be isolated by mapping to the same chromosome or locus as the TWIK-9 gene.

[2147] Orthologues, homologues and allelic variants can be identified using methods known in the art (e.g., by hybridization to an isolated nucleic acid molecule of the present invention, for example, under stringent hybridization conditions). In one embodiment, an isolated nucleic acid molecule of the invention is at least 15, 20, 25, 30 or more nucleotides in length and hybridizes under stringent conditions to the nucleic acid molecule comprising the nucleotide sequence of SEQ ID NO:40 or 42, or the nucleotide sequence of the DNA insert of the plasmid deposited with ATCC as Accession Number ______. In other embodiment, the nucleic acid is at least 50-100, 100-200, 200-300, 305, 305-400, 400-500, 500-600, 600-700, 700-800, 800-900, 900-1000, 1000-1100, 1000-1200 or more nucleotides in length.

[2148] As used herein, the term “hybridizes under stringent conditions” is intended to describe conditions for hybridization and washing under which nucleotide sequences that are significantly identical or homologous to each other remain hybridized to each other. Preferably, the conditions are such that sequences at least about 70%, more preferably at least about 80%, even more preferably at least about 85% or 90% identical to each other remain hybridized to each other. Such stringent conditions are known to those skilled in the art and can be found in Current Protocols in Molecular Biology, Ausubel et al., eds., John Wiley & Sons, Inc. (1995), sections 2, 4, and 6. Additional stringent conditions can be found in Molecular Cloning: A Laboratory Manual, Sambrook et al., Cold Spring Harbor Press, Cold Spring Harbor, N.Y. (1989), chapters 7, 9, and 11. A preferred, non-limiting example of stringent hybridization conditions includes hybridization in 4×sodium chloride/sodium citrate (SSC), at about 65-70° C. (or alternatively hybridization in 4×SSC plus 50% formamide at about 42-50° C.) followed by one or more washes in 1×SSC, at about 65-70° C. A preferred, non-limiting example of highly stringent hybridization conditions includes hybridization in 1×SSC, at about 65-70° C. (or alternatively hybridization in 1×SSC plus 50% formamide at about 42-50° C.) followed by one or more washes in 0.3×SSC, at about 65-70° C. A preferred, non-limiting example of reduced stringency hybridization conditions includes hybridization in 4×SSC, at about 50-60° C. (or alternatively hybridization in 6×SSC plus 50% formamide at about 40-45° C.) followed by one or more washes in 2×SSC, at about 50-60° C. Ranges intermediate to the above-recited values, e.g., at 65-70° C. or at 42-50° C. are also intended to be encompassed by the present invention. SSPE (1×SSPE is 0.15M NaCl, 10 mM NaH₂PO₄, and 1.25 mM EDTA, pH 7.4) can be substituted for SSC (1×SSC is 0.15M NaCl and 15 mM sodium citrate) in the hybridization and wash buffers; washes are performed for 15 minutes each after hybridization is complete. The hybridization temperature for hybrids anticipated to be less than 50 base pairs in length should be 5-10° C. less than the melting temperature (Tₘ) of the hybrid, where Tₘ is determined according to the following equations. For hybrids less than 18 base pairs in length, Tₘ(° C.)=2(# of A+T bases)+4(# of G+C bases). For hybrids between 18 and 49 base pairs in length, Tₘ(° C.)=81.5+16.6(log₁₀[Na⁺])+0.41(%G+C)−(600/N), where N is the number of bases in the hybrid, and [Na⁺] is the concentration of sodium ions in the hybridization buffer ([Na⁺] for 1×SSC=0.165 M). It will also be recognized by the skilled practitioner that additional reagents may be added to hybridization and/or wash buffers to decrease non-specific hybridization of nucleic acid molecules to membranes, for example, nitrocellulose or nylon membranes, including but not limited to blocking agents (e.g., BSA or salmon or herring sperm carrier DNA), detergents (e.g., SDS), chelating agents (e.g., EDTA), Ficoll, PVP and the like. When using nylon membranes, in particular, an additional preferred, non-limiting example of stringent hybridization conditions is hybridization in 0.25-0.5M NaH₂PO₄, 7% SDS at about 65° C., followed by one or more washes at 0.02M NaH₂PO₄, 1% SDS at 65° C. (see e.g., Church and Gilbert (1984) Proc. Natl. Acad. Sci. USA 81:1991-1995), or alternatively 0.2×SSC, 1% SDS.

[2149] Preferably, an isolated nucleic acid molecule of the invention that hybridizes under stringent conditions to the sequence of SEQ ID NO:40 or 42 corresponds to a naturally-occurring nucleic acid molecule. As used herein, a “naturally-occurring” nucleic acid molecule refers to an RNA or DNA molecule having a nucleotide sequence that occurs in nature (e.g., encodes a natural protein).

[2150] In addition to naturally-occurring allelic variants of the TWIK-9 sequences that may exist in the population, the skilled artisan will further appreciate that changes can be introduced by mutation into the nucleotide sequences of SEQ ID NO:40 or 42, or the nucleotide sequence of the DNA insert of the plasmid deposited with ATCC as Accession Number ______, thereby leading to changes in the amino acid sequence of the encoded TWIK-9 proteins, without altering the functional ability of the TWIK-9 proteins. For example, nucleotide substitutions leading to amino acid substitutions at “non-essential” amino acid residues can be made in the sequence of SEQ ID NO:40 or 42, or the nucleotide sequence of the DNA insert of the plasmid deposited with ATCC as Accession Number ______. A “non-essential” amino acid residue is a residue that can be altered from the wild-type sequence of TWIK-9 (e.g., the sequence of SEQ ID NO:41) without altering the biological activity, whereas an “essential” amino acid residue is required for biological activity. For example, amino acid residues that are conserved among the TWIK-9 proteins of the present invention, e.g., those present in a transmembrane domain or P loop, are predicted to be particularly unamenable to alteration. Furthermore, additional amino acid residues that are conserved between the TWIK-9 proteins of the present invention and other members of the TWIK family are not likely to be amenable to alteration.

[2151] Accordingly, another aspect of the invention pertains to nucleic acid molecules encoding TWIK-9 proteins that contain changes in amino acid residues that are not essential for activity. Such TWIK-9 proteins differ in amino acid sequence from SEQ ID NO:41, yet retain biological activity. In one embodiment, the isolated nucleic acid molecule comprises a nucleotide sequence encoding a protein, wherein the protein comprises an amino acid sequence at least about 50%, 55%, 60%, 65%, 70%, 75%, 80%, 85%, 90%, 91%, 92% 93%, 94%, 95%, 96%, 97%, 98% 99% or more homologous to SEQ ID NO:41, e.g., to the entire length of SEQ ID NO:41.

[2152] An isolated nucleic acid molecule encoding a TWIK-9 protein homologous to the protein of SEQ ID NO:41 can be created by introducing one or more nucleotide substitutions, additions or deletions into the nucleotide sequence of SEQ ID NO:40 or 42, or the nucleotide sequence of the DNA insert of the plasmid deposited with ATCC as Accession Number ______, such that one or more amino acid substitutions, additions or deletions are introduced into the encoded protein. Mutations can be introduced into SEQ ID NO:40 or 42, or the nucleotide sequence of the DNA insert of the plasmid deposited with ATCC as Accession Number ______ by standard techniques, such as site-directed mutagenesis and PCR-mediated mutagenesis.

[2153] Preferably, conservative amino acid substitutions are made at one or more predicted non-essential amino acid residues. A “conservative amino acid substitution” is one in which the amino acid residue is replaced with an amino acid residue having a similar side chain. Families of amino acid residues having similar side chains have been defined in the art. These families include amino acids with basic side chains (e.g., lysine, arginine, histidine), acidic side chains (e.g., aspartic acid, glutamic acid), uncharged polar side chains (e.g., glycine, asparagine, glutamine, serine, threonine, tyrosine, cysteine, tryptophan), nonpolar side chains (e.g., alanine, valine, leucine, isoleucine, proline, phenylalanine, methionine), beta-branched side chains (e.g., threonine, valine, isoleucine) and aromatic side chains (e.g., tyrosine, phenylalanine, tryptophan, histidine). Thus, a predicted nonessential amino acid residue in a TWIK-9 protein is preferably replaced with another amino acid residue from the same side chain family. Alternatively, in another embodiment, mutations can be introduced randomly along all or part of a TWIK-9 coding sequence, such as by saturation mutagenesis, and the resultant mutants can be screened for TWIK-9 biological activity to identify mutants that retain activity. Following mutagenesis of SEQ ID NO:40 or 42, or the nucleotide sequence of the DNA insert of the plasmid deposited with ATCC as Accession Number ______, the encoded protein can be expressed recombinantly and the activity of the protein can be determined.

[2154] In a preferred embodiment, a mutant TWIK-9 protein can be assayed for the ability to: (1) interact with a non-TWIK protein molecule; (2) activate a TWIK-dependent signal transduction pathway; (3) modulate the release of neurotransmitters; (4) modulating membrane excitability; (5) influence the resting potential of membranes, wave forms and frequencies of action potentials, and thresholds of excitation, (6) modulate processes which underlie learning and memory, such as integration of sub-threshold synaptic responses and the conductance of back-propagating action potentials, and (7) mediate nociception.

[2155] In addition to the nucleic acid molecules encoding TWIK-9 proteins described above, another aspect of the invention pertains to isolated nucleic acid molecules which are antisense thereto. In an exemplary embodiment, the invention provides an isolated nucleic acid molecule which is antisense to a TWIK-9 nucleic acid molecule (e.g., is antisense to the coding strand of a TWIK-9 nucleic acid molecule). An “antisense” nucleic acid comprises a nucleotide sequence which is complementary to a “sense” nucleic acid encoding a protein, e.g., complementary to the coding strand of a double-stranded cDNA molecule or complementary to an mRNA sequence. Accordingly, an antisense nucleic acid can hydrogen bond to a sense nucleic acid. The antisense nucleic acid can be complementary to an entire TWIK-9 coding strand, or to only a portion thereof. In one embodiment, an antisense nucleic acid molecule is antisense to “coding region sequences” of the coding strand of a nucleotide sequence encoding TWIK-9. The term “coding region sequences” refers to the region of the nucleotide sequence comprising codons which are translated into amino acid residues (e.g., the coding region sequences of human TWIK-9 corresponding to SEQ ID NO:42). In another embodiment, the antisense nucleic acid molecule is antisense to a “noncoding region” of the coding strand of a nucleotide sequence encoding TWIK-9. The term “noncoding region” refers to 5′ and/or 3′ sequences which flank the coding region sequences that are not translated into amino acids (also referred to as 5′ and 3′ untranslated regions).

[2156] Given the coding strand sequences encoding TWIK-9 disclosed herein (e.g., SEQ ID NO:42), antisense nucleic acids of the invention can be designed according to the rules of Watson and Crick base pairing. The antisense nucleic acid molecule can be complementary to coding region sequences of TWIK-9 mRNA, but more preferably is an oligonucleotide which is antisense to only a portion of the TWIK-9 mRNA. An antisense oligonucleotide can be, for example, about 5, 10, 15, 20, 25, 30, 35, 40, 45, 50, 55, 60, 65, 70, 75, 80, or more nucleotides in length. An antisense nucleic acid of the invention can be constructed using chemical synthesis and enzymatic ligation reactions using procedures known in the art. For example, an antisense nucleic acid (e.g., an antisense oligonucleotide) can be chemically synthesized using naturally occurring nucleotides or variously modified nucleotides designed to increase the biological stability of the molecules or to increase the physical stability of the duplex formed between the antisense and sense nucleic acids, e.g., phosphorothioate derivatives and acridine substituted nucleotides can be used. Examples of modified nucleotides which can be used to generate the antisense nucleic acid include 5-fluorouracil, 5-bromouracil, 5-chlorouracil, 5-iodouracil, hypoxanthine, xantine, 4-acetylcytosine, 5-(carboxyhydroxylmethyl) uracil, 5-carboxymethylaminomethyl-2-thiouridine, 5-carboxymethylaminomethyluracil, dihydrouracil, beta-D-galactosylqueosine, inosine, N6-isopentenyladenine, 1-methylguanine, 1-methylinosine, 2,2-dimethylguanine, 2-methyladenine, 2-methylguanine, 3-methylcytosine, 5-methylcytosine, N6-adenine, 7-methylguanine, 5-methylaminomethyluracil, 5-methoxyaminomethyl-2-thiouracil, beta-D-mannosylqueosine, 5′-methoxycarboxymethyluracil, 5-methoxyuracil, 2-methylthio-N6-isopentenyladenine, uracil-5-oxyacetic acid (v), wybutoxosine, pseudouracil, queosine, 2-thiocytosine, 5-methyl-2-thiouracil, 2-thiouracil, 4-thiouracil, 5-methyluracil, uracil-5-oxyacetic acid methylester, uracil-5-oxyacetic acid (v), 5-methyl-2-thiouracil, 3-(3-amino-3-N-2-carboxypropyl) uracil, (acp3)w, and 2,6-diaminopurine. Alternatively, the antisense nucleic acid can be produced biologically using an expression vector into which a nucleic acid has been subcloned in an antisense orientation (i.e., RNA transcribed from the inserted nucleic acid will be of an antisense orientation to a target nucleic acid of interest, described further in the following subsection).

[2157] The antisense nucleic acid molecules of the invention are typically administered to a subject or generated in situ such that they hybridize with or bind to cellular mRNA and/or genomic DNA encoding a TWIK-9 protein to thereby inhibit expression of the protein, e.g., by inhibiting transcription and/or translation. The hybridization can be by conventional nucleotide complementarity to form a stable duplex, or, for example, in the case of an antisense nucleic acid molecule which binds to DNA duplexes, through specific interactions in the major groove of the double helix. An example of a route of administration of antisense nucleic acid molecules of the invention include direct injection at a tissue site. Alternatively, antisense nucleic acid molecules can be modified to target selected cells and then administered systemically. For example, for systemic administration, antisense molecules can be modified such that they specifically bind to receptors or antigens expressed on a selected cell surface, e.g., by linking the antisense nucleic acid molecules to peptides or antibodies which bind to cell surface receptors or antigens. The antisense nucleic acid molecules can also be delivered to cells using the vectors described herein. To achieve sufficient intracellular concentrations of the antisense molecules, vector constructs in which the antisense nucleic acid molecule is placed under the control of a strong pol II or pol III promoter are preferred.

[2158] In yet another embodiment, the antisense nucleic acid molecule of the invention is an α-anomeric nucleic acid molecule. An α-anomeric nucleic acid molecule forms specific double-stranded hybrids with complementary RNA in which, contrary to the usual β-units, the strands run parallel to each other (Gaultier et al. (1987) Nucleic Acids. Res. 15:6625-6641). The antisense nucleic acid molecule can also comprise a 2′-o-methylribonucleotide (Inoue et al. (1987) Nucleic Acids Res. 15:6131-6148) or a chimeric RNA-DNA analogue (Inoue et al. (1987) FEBS Lett. 215:327-330).

[2159] In still another embodiment, an antisense nucleic acid of the invention is a ribozyme. Ribozymes are catalytic RNA molecules with ribonuclease activity which are capable of cleaving a single-stranded nucleic acid, such as an mRNA, to which they have a complementary region. Thus, ribozymes (e.g., hammerhead ribozymes (described in Haseloff and Gerlach (1988) Nature 334:585-591)) can be used to catalytically cleave TWIK-9 mRNA transcripts to thereby inhibit translation of TWIK-9 mRNA. A ribozyme having specificity for a TWIK-9-encoding nucleic acid can be designed based upon the nucleotide sequence of a TWIK-9 cDNA disclosed herein (i.e., SEQ ID NO:40 or 42, or the nucleotide sequence of the DNA insert of the plasmid deposited with ATCC as Accession Number ______). For example, a derivative of a Tetrahymena L-19 IVS RNA can be constructed in which the nucleotide sequence of the active site is complementary to the nucleotide sequence to be cleaved in a TWIK-9-encoding mRNA. See, e.g., Cech et al. U.S. Pat. No. 4,987,071; and Cech et al. U.S. Pat. No. 5,116,742. Alternatively, TWIK-9 mRNA can be used to select a catalytic RNA having a specific ribonuclease activity from a pool of RNA molecules. See, e.g., Bartel, D. and Szostak, J. W. (1993) Science 261:1411-1418.

[2160] Alternatively, TWIK-9 gene expression can be inhibited by targeting nucleotide sequences complementary to the regulatory region of the TWIK-9 (e.g., the TWIK-9 promoter and/or enhancers; e.g., nucleotides 1-14 of SEQ ID NO:40) to form triple helical structures that prevent transcription of the TWIK-9 gene in target cells. See generally, Helene, C. (1991) Anticancer Drug Des. 6(6):569-84; Helene, C. et al. (1992) Ann. N.Y. Acad. Sci. 660:27-36; and Maher, L. J. (1992) Bioassays 14(12):807-15.

[2161] In yet another embodiment, the TWIK-9 nucleic acid molecules of the present invention can be modified at the base moiety, sugar moiety or phosphate backbone to improve, e.g., the stability, hybridization, or solubility of the molecule. For example, the deoxyribose phosphate backbone of the nucleic acid molecules can be modified to generate peptide nucleic acids (see Hyrup, B. et al. (1996) Bioorganic & Medicinal Chemistry 4(1):5-23). As used herein, the terms “peptide nucleic acids” or “PNAs” refer to nucleic acid mimics, e.g., DNA mimics, in which the deoxyribose phosphate backbone is replaced by a pseudopeptide backbone and only the four natural nucleobases are retained. The neutral backbone of PNAs has been shown to allow for specific hybridization to DNA and RNA under conditions of low ionic strength. The synthesis of PNA oligomers can be performed using standard solid phase peptide synthesis protocols as described in Hyrup, B. et al. (1996) supra; Perry-O'Keefe et al. (1996) Proc. Natl. Acad. Sci. USA 93:14670-675.

[2162] PNAs of TWIK-9 nucleic acid molecules can be used in therapeutic and diagnostic applications. For example, PNAs can be used as antisense or antigene agents for sequence-specific modulation of gene expression by, for example, inducing transcription or translation arrest or inhibiting replication. PNAs of TWIK-9 nucleic acid molecules can also be used in the analysis of single base pair mutations in a gene, (e.g., by PNA-directed PCR clamping); as ‘artificial restriction enzymes’ when used in combination with other enzymes, (e.g., S1 nucleases (Hyrup, B. et al. (1996) supra)); or as probes or primers for DNA sequencing or hybridization (Hyrup, B. et al. (1996) supra; Perry-O'Keefe et al. (1996) supra).

[2163] In another embodiment, PNAs of TWIK-9 can be modified, (e.g., to enhance their stability or cellular uptake), by attaching lipophilic or other helper groups to PNA, by the formation of PNA-DNA chimeras, or by the use of liposomes or other techniques of drug delivery known in the art. For example, PNA-DNA chimeras of TWIK-9 nucleic acid molecules can be generated which may combine the advantageous properties of PNA and DNA. Such chimeras allow DNA recognition enzymes (e.g., RNase H and DNA polymerases) to interact with the DNA portion while the PNA portion would provide high binding affinity and specificity. PNA-DNA chimeras can be linked using linkers of appropriate lengths selected in terms of base stacking, number of bonds between the nucleobases, and orientation (Hyrup, B. et al. (1996) supra). The synthesis of PNA-DNA chimeras can be performed as described in Hyrup, B. et al. (1996) supra and Finn, P. J. et al. (1996) Nucleic Acids Res. 24 (17):3357-63. For example, a DNA chain can be synthesized on a solid support using standard phosphoramidite coupling chemistry and modified nucleoside analogs, e.g., 5′-(4-methoxytrityl)amino-5′-deoxy-thymidine phosphoramidite, can be used as a between the PNA and the 5′ end of DNA (Mag, M. et al. (1989) Nucleic Acid Res. 17:5973-88). PNA monomers are then coupled in a stepwise manner to produce a chimeric molecule with a 5′ PNA segment and a 3′ DNA segment (Finn, P. J. et al. (1996) supra). Alternatively, chimeric molecules can be synthesized with a 5′ DNA segment and a 3′ PNA segment (Peterser, K. H. et al. (1975) Bioorganic Med. Chem. Lett. 5: 1119-11124).

[2164] In other embodiments, the oligonucleotide may include other appended groups such as peptides (e.g., for targeting host cell receptors in vivo), or agents facilitating transport across the cell membrane (see, e.g., Letsinger et al. (1989) Proc. Natl. Acad. Sci. USA 86:6553-6556; Lemaitre et al. (1987) Proc. Natl. Acad. Sci. USA 84:648-652; PCT Publication No. W088/09810) or the blood-brain barrier (see, e.g., PCT Publication No. W089/10134). In addition, oligonucleotides can be modified with hybridization-triggered cleavage agents (See, e.g., Krol et al. (1988) Bio-Techniques 6:958-976) or intercalating agents (See, e.g., Zon (1988) Pharm. Res. 5:539-549). To this end, the oligonucleotide may be conjugated to another molecule, (e.g., a peptide, hybridization triggered cross-linking agent, transport agent, or hybridization-triggered cleavage agent).

[2165] Alternatively, the expression characteristics of an endogenous TWIK-9 gene within a cell line or microorganism may be modified by inserting a heterologous DNA regulatory element into the genome of a stable cell line or cloned microorganism such that the inserted regulatory element is operatively linked with the endogenous TWIK-9 gene. For example, an endogenous TWIK-9 gene which is normally “transcriptionally silent”, i.e., a TWIK-9 gene which is normally not expressed, or is expressed only at very low levels in a cell line or microorganism, may be activated by inserting a regulatory element which is capable of promoting the expression of a normally expressed gene product in that cell line or microorganism. Alternatively, a transcriptionally silent, endogenous TWIK-9 gene may be activated by insertion of a promiscuous regulatory element that works across cell types.

[2166] A heterologous regulatory element may be inserted into a stable cell line or cloned microorganism, such that it is operatively linked with an endogenous TWIK-9 gene, using techniques, such as targeted homologous recombination, which are well known to those of skill in the art, and described, e.g., in Chappel, U.S. Pat. No. 5,272,071; PCT publication No. WO 91/06667, published May 16, 1991.

[2167] II. Isolated TWIK-9 Proteins and Anti-TWIK-9 Antibodies

[2168] One aspect of the invention pertains to isolated or recombinant TWIK-9 proteins and polypeptides, and biologically active portions thereof, as well as polypeptide fragments suitable for use as immunogens to raise anti-TWIK-9 antibodies. In one embodiment, native TWIK-9 proteins can be isolated from cells or tissue sources by an appropriate purification scheme using standard protein purification techniques. In another embodiment, TWIK-9 proteins are produced by recombinant DNA techniques. Alternative to recombinant expression, a TWIK-9 protein or polypeptide can be synthesized chemically using standard peptide synthesis techniques.

[2169] An “isolated” or “purified” protein or biologically active portion thereof is substantially free of cellular material or other contaminating proteins from the cell or tissue source from which the TWIK-9 protein is derived, or substantially free from chemical precursors or other chemicals when chemically synthesized. The language “substantially free of cellular material” includes preparations of TWIK-9 protein in which the protein is separated from cellular components of the cells from which it is isolated or recombinantly produced. In one embodiment, the language “substantially free of cellular material” includes preparations of TWIK-9 protein having less than about 30% (by dry weight) of non-TWIK-9 protein (also referred to herein as a “contaminating protein”), more preferably less than about 20% of non-TWIK-9 protein, still more preferably less than about 10% of non-TWIK-9 protein, and most preferably less than about 5% non-TWIK-9 protein. When the TWIK-9 protein or biologically active portion thereof is recombinantly produced, it is also preferably substantially free of culture medium, i.e., culture medium represents less than about 20%, more preferably less than about 10%, and most preferably less than about 5% of the volume of the protein preparation.

[2170] The language “substantially free of chemical precursors or other chemicals” includes preparations of TWIK-9 protein in which the protein is separated from chemical precursors or other chemicals which are involved in the synthesis of the protein. In one embodiment, the language “substantially free of chemical precursors or other chemicals” includes preparations of TWIK-9 protein having less than about 30% (by dry weight) of chemical precursors or non-TWIK-9 chemicals, more preferably less than about 20% chemical precursors or non-TWIK-9 chemicals, still more preferably less than about 10% chemical precursors or non-TWIK-9 chemicals, and most preferably less than about 5% chemical precursors or non-TWIK-9 chemicals.

[2171] As used herein, a “biologically active portion” of a TWIK-9 protein includes a fragment of a TWIK-9 protein which participates in an interaction between a TWIK-9 molecule and a non-TWIK-9 molecule (e.g., a TWIK-9 ligand or substrate). Biologically active portions of a TWIK-9 protein include peptides comprising amino acid sequences sufficiently homologous to or derived from the TWIK-9 amino acid sequences, e.g., the amino acid sequences shown in SEQ ID NO:41, which include sufficient amino acid residues to exhibit at least one activity of a TWIK-9 protein. Typically, biologically active portions comprise a domain or motif with at least one activity of the TWIK-9 protein, e.g., modulation of pain signaling mechanisms, membrane excitability or neurotransmitter release. A biologically active portion of a TWIK-9 protein can be a polypeptide which is, for example, 10, 25, 50, 75, 100, 125, 150, 175, 200, 225, 250, 275, 300 or more amino acids in length. Biologically active portions of a TWIK-9 protein can be used as targets for developing agents which modulate a TWIK-9 mediated activity, e.g., modulation of pain signaling mechanisms, membrane excitability or neurotransmitter release activities.

[2172] In one embodiment, a biologically active portion of a TWIK-9 protein comprises at least one preferably two, three, or four transmembrane domains, and/or at least one, preferably two pore loops (P-loops). Moreover, other biologically active portions, in which other regions of the protein are deleted, can be prepared by recombinant techniques and evaluated for one or more of the functional activities of a native TWIK-9 protein.

[2173] Another aspect of the invention features fragments of the protein having the amino acid sequence of SEQ ID NO:41, for example, for use as immunogens. In one embodiment, a fragment comprises at least 5 amino acids (e.g., contiguous or consecutive amino acids) of the amino acid sequence of SEQ ID NO:41, or an amino acid sequence encoded by the DNA insert of the plasmid deposited with the ATCC as Accession Number ______. In another embodiment, a fragment comprises at least 10, 15, 20, 25, 30, 35, 40, 45, 50 or more amino acids (e.g, contiguous or consecutive amino acids) of the amino acid sequence of SEQ ID NO:41, or an amino acid sequence encoded by the DNA insert of the plasmid deposited with the ATCC as Accession Number ______.

[2174] In a preferred embodiment, a TWIK-9 protein has an amino acid sequence shown in SEQ ID NO:41. In other embodiments, the TWIK-9 protein is substantially identical to SEQ ID NO:41, and retains the functional activity of the protein of SEQ ID NO:41, yet differs in amino acid sequence due to natural allelic variation or mutagenesis, as described in detail in subsection I above. In another embodiment, the TWIK-9 protein is a protein which comprises an amino acid sequence at least about 50%, 55%, 60%, 65%, 70%, 75%, 80%, 85%, 90%, 91%, 92%, 93%, 94%, 95%, 96%, 97%, 98%, 99% or more identical to SEQ ID NO:41.

[2175] In another embodiment, the invention features a TWIK-9 protein which is encoded by a nucleic acid molecule consisting of a nucleotide sequence at least about 50%, 55%, 60%, 65%, 70%, 75%, 80%, 85%, 90%, 91%, 92%, 93%, 94%, 95%, 96%, 97%, 98%, 99% or more identical to a nucleotide sequence of SEQ ID NO:40 or 42, or a complement thereof. This invention further features a TWIK-9 protein which is encoded by a nucleic acid molecule consisting of a nucleotide sequence which hybridizes under stringent hybridization conditions to a complement of a nucleic acid molecule comprising the nucleotide sequence of SEQ ID NO:40 or 42, or a complement thereof.

[2176] To determine the percent identity of two amino acid sequences or of two nucleic acid sequences, the sequences are aligned for optimal comparison purposes (e.g., gaps can be introduced in one or both of a first and a second amino acid or nucleic acid sequence for optimal alignment and non-homologous sequences can be disregarded for comparison purposes). In a preferred embodiment, the length of a reference sequence aligned for comparison purposes is at least 30%, preferably at least 40%, more preferably at least 50%, even more preferably at least 60%, and even more preferably at least 70%, 80%, or 90% of the length of the reference sequence (e.g., when aligning a second sequence to the TWIK-9 amino acid sequence of SEQ ID NO:41 having 374 amino acid residues, at least 112, preferably at least 150, more preferably at least 187, even more preferably at least 224, and even more preferably at least 262, 299 or 337 amino acid residues are aligned). The amino acid residues or nucleotides at corresponding amino acid positions or nucleotide positions are then compared. When a position in the first sequence is occupied by the same amino acid residue or nucleotide as the corresponding position in the second sequence, then the molecules are identical at that position (as used herein amino acid or nucleic acid “identity” is equivalent to amino acid or nucleic acid “homology”). The percent identity between the two sequences is a function of the number of identical positions shared by the sequences, taking into account the number of gaps, and the length of each gap, which need to be introduced for optimal alignment of the two sequences.

[2177] The comparison of sequences and determination of percent identity between two sequences can be accomplished using a mathematical algorithm. In a preferred embodiment, the percent identity between two amino acid sequences is determined using the Needleman and Wunsch (J. Mol. Biol. (48):444-453 (1970)) algorithm which has been incorporated into the GAP program in the GCG software package (available at http://www.gcg.com), using either a Blossum 62 matrix or a PAM250 matrix, and a gap weight of 16, 14, 12, 10, 8, 6, or 4 and a length weight of 1, 2, 3, 4, 5, or 6. In yet another preferred embodiment, the percent identity between two nucleotide sequences is determined using the GAP program in the GCG software package (available at http://www.gcg.com), using a NWSgapdna.CMP matrix and a gap weight of 40, 50, 60, 70, or 80 and a length weight of 1, 2, 3, 4, 5, or 6. A preferred, non-limiting example of parameters to be used in conjunction with the GAP program include a Blosum 62 scoring matrix with a gap penalty of 12, a gap extend penalty of 4, and a frameshift gap penalty of 5.

[2178] In another embodiment, the percent identity between two amino acid or nucleotide sequences is determined using the algorithm of Meyers and Miller (Comput. Appl. Biosci., 4:11-17 (1988)) which has been incorporated into the ALIGN program (version 2.0 or version 2.0U), using a PAM120 weight residue table, a gap length penalty of 12 and a gap penalty of 4.

[2179] The nucleic acid and protein sequences of the present invention can further be used as a “query sequence” to perform a search against public databases to, for example, identify other family members or related sequences. Such searches can be performed using the NBLAST and XBLAST programs (version 2.0) of Altschul et al. (1990) J. Mol. Biol. 215:403-10. BLAST nucleotide searches can be performed with the NBLAST program, score=100, wordlength=12 to obtain nucleotide sequences homologous to TWIK-9 nucleic acid molecules of the invention. BLAST protein searches can be performed with the XBLAST program, score=50, wordlength=3 to obtain amino acid sequences homologous to TWIK-9 protein molecules of the invention. To obtain gapped alignments for comparison purposes, Gapped BLAST can be utilized as described in Altschul et al. (1997) Nucleic Acids Res. 25(17):3389-3402. When utilizing BLAST and Gapped BLAST programs, the default parameters of the respective programs (e.g., XBLAST and NBLAST) can be used. See http://www.ncbi.nlm.nih.gov.

[2180] The invention also provides TWIK-9 chimeric or fusion proteins. As used herein, a TWIK-9 “chimeric protein” or “fusion protein” comprises a TWIK-9 polypeptide operatively linked to a non-TWIK-9 polypeptide. A “TWIK-9 polypeptide” refers to a polypeptide having an amino acid sequence corresponding to TWIK-9, whereas a “non-TWIK-9 polypeptide” refers to a polypeptide having an amino acid sequence corresponding to a protein which is not substantially homologous to the TWIK-9 protein, e.g., a protein which is different from the TWIK-9 protein and which is derived from the same or a different organism. Within a TWIK-9 fusion protein the TWIK-9 polypeptide can correspond to all or a portion of a TWIK-9 protein. In a preferred embodiment, a TWIK-9 fusion protein comprises at least one biologically active portion of a TWIK-9 protein. In another preferred embodiment, a TWIK-9 fusion protein comprises at least two biologically active portions of a TWIK-9 protein. Within the fusion protein, the term “operatively linked” is intended to indicate that the TWIK-9 polypeptide and the non-TWIK-9 polypeptide are fused in-frame to each other. The non-TWIK-9 polypeptide can be fused to the N-terminus or C-terminus of the TWIK-9 polypeptide.

[2181] For example, in one embodiment, the fusion protein is a GST-TWIK-9 fusion protein in which the TWIK-9 sequences are fused to the C-terminus of the GST sequences. Such fusion proteins can facilitate the purification of recombinant TWIK-9. In another embodiment, the fusion protein is a TWIK-9 protein containing a heterologous signal sequence at its N-terminus. In certain host cells (e.g., mammalian host cells), expression and/or secretion of TWIK-9 can be increased through use of a heterologous signal sequence.

[2182] The TWIK-9 fusion proteins of the invention can be incorporated into pharmaceutical compositions and administered to a subject in vivo. The TWIK-9 fusion proteins can be used to affect the bioavailability of a TWIK-9 ligand and/or substrate. Use of TWIK-9 fusion proteins may be useful therapeutically for the treatment of disorders caused by, for example, (i) aberrant modification or mutation of a gene encoding a TWIK-9 protein; (ii) mis-regulation of the TWIK-9 gene; and (iii) aberrant post-translational modification of a TWIK-9 protein.

[2183] Moreover, the TWIK-9-fusion proteins of the invention can be used as immunogens to produce anti-TWIK-9 antibodies in a subject, to purify TWIK-9 substrates, and in screening assays to identify molecules which inhibit or enhance the interaction of TWIK-9 with a TWIK-9 ligand and/or substrate.

[2184] Preferably, a TWIK-9 chimeric or fusion protein of the invention is produced by standard recombinant DNA techniques. For example, DNA fragments coding for the different polypeptide sequences are ligated together in-frame in accordance with conventional techniques, for example by employing blunt-ended or stagger-ended termini for ligation, restriction enzyme digestion to provide for appropriate termini, filling-in of cohesive ends as appropriate, alkaline phosphatase treatment to avoid undesirable joining, and enzymatic ligation. In another embodiment, the fusion gene can be synthesized by conventional techniques including automated DNA synthesizers. Alternatively, PCR amplification of gene fragments can be carried out using anchor primers which give rise to complementary overhangs between two consecutive gene fragments which can subsequently be annealed and reamplified to generate a chimeric gene sequence (see, for example, Current Protocols in Molecular Biology, eds. Ausubel et al. John Wiley & Sons:1992). Moreover, many expression vectors are commercially available that already encode a fusion moiety (e.g., a GST polypeptide). A TWIK-9-encoding nucleic acid can be cloned into such an expression vector such that the fusion moiety is linked in-frame to the TWIK-9 protein.

[2185] The present invention also pertains to variants of the TWIK-9 proteins which function as either TWIK-9 agonists (mimetics) or as TWIK-9 antagonists. Variants of the TWIK-9 proteins can be generated by mutagenesis, e.g., discrete point mutation or truncation of a TWIK-9 protein. An agonist of the TWIK-9 proteins can retain substantially the same, or a subset, of the biological activities of the naturally occurring form of a TWIK-9 protein. An antagonist of a TWIK-9 protein can inhibit one or more of the activities of the naturally occurring form of the TWIK-9 protein by, for example, competitively modulating a TWIK-9-mediated activity of a TWIK-9 protein. Thus, specific biological effects can be elicited by treatment with a variant of limited function. In one embodiment, treatment of a subject with a variant having a subset of the biological activities of the naturally occurring form of the protein has fewer side effects in a subject relative to treatment with the naturally occurring form of the TWIK-9 protein.

[2186] In one embodiment, variants of a TWIK-9 protein which function as either TWIK-9 agonists (mimetics) or as TWIK-9 antagonists can be identified by screening combinatorial libraries of mutants, e.g., truncation mutants, of a TWIK-9 protein for TWIK-9 protein agonist or antagonist activity. In one embodiment, a variegated library of TWIK-9 variants is generated by combinatorial mutagenesis at the nucleic acid level and is encoded by a variegated gene library. A variegated library of TWIK-9 variants can be produced by, for example, enzymatically ligating a mixture of synthetic oligonucleotides into gene sequences such that a degenerate set of potential TWIK-9 sequences is expressible as individual polypeptides, or alternatively, as a set of larger fusion proteins (e.g., for phage display) containing the set of TWIK-9 sequences therein. There are a variety of methods which can be used to produce libraries of potential TWIK-9 variants from a degenerate oligonucleotide sequence. Chemical synthesis of a degenerate gene sequence can be performed in an automatic DNA synthesizer, and the synthetic gene then ligated into an appropriate expression vector. Use of a degenerate set of genes allows for the provision, in one mixture, of all of the sequences encoding the desired set of potential TWIK-9 sequences. Methods for synthesizing degenerate oligonucleotides are known in the art (see, e.g., Narang, S. A. (1983) Tetrahedron 39:3; Itakura et al. (1984) Annu. Rev. Biochem. 53:323; Itakura et al. (1984) Science 198:1056; Ike et al. (1983) Nucleic Acid Res. 11:477.

[2187] In addition, libraries of fragments of a TWIK-9 protein coding sequence can be used to generate a variegated population of TWIK-9 fragments for screening and subsequent selection of variants of a TWIK-9 protein. In one embodiment, a library of coding sequence fragments can be generated by treating a double stranded PCR fragment of a TWIK-9 coding sequence with a nuclease under conditions wherein nicking occurs only about once per molecule, denaturing the double stranded DNA, renaturing the DNA to form double stranded DNA which can include sense/antisense pairs from different nicked products, removing single stranded portions from reformed duplexes by treatment with S1 nuclease, and ligating the resulting fragment library into an expression vector. By this method, an expression library can be derived which encodes N-terminal, C-terminal and internal fragments of various sizes of the TWIK-9 protein.

[2188] Several techniques are known in the art for screening gene products of combinatorial libraries made by point mutations or truncation, and for screening cDNA libraries for gene products having a selected property. Such techniques are adaptable for rapid screening of the gene libraries generated by the combinatorial mutagenesis of TWIK-9 proteins. The most widely used techniques, which are amenable to high through-put analysis, for screening large gene libraries typically include cloning the gene library into replicable expression vectors, transforming appropriate cells with the resulting library of vectors, and expressing the combinatorial genes under conditions in which detection of a desired activity facilitates isolation of the vector encoding the gene whose product was detected. Recursive ensemble mutagenesis (REM), a new technique which enhances the frequency of functional mutants in the libraries, can be used in combination with the screening assays to identify TWIK-9 variants (Arkin and Youvan (1992) Proc. Natl. Acad. Sci. USA 89:7811-7815; Delagrave et al. (1993) Protein Eng. 6(3):327-331).

[2189] In one embodiment, cell based assays can be exploited to analyze a variegated TWIK-9 library. For example, a library of expression vectors can be transfected into a cell line, e.g, a neuronal cell line, which ordinarily responds to TWIK-9 in a particular TWIK-9 ligand-dependent manner. The transfected cells are then contacted with TWIK-9 and the effect of the expression of the mutant on, e.g., membrane excitability of TWIK-9 can be detected. Plasmid DNA can then be recovered from the cells which score for inhibition, or alternatively, potentiation of signaling by the TWIK-9 ligand, and the individual clones further characterized.

[2190] An isolated TWIK-9 protein, or a portion or fragment thereof, can be used as an immunogen to generate antibodies that bind TWIK-9 using standard techniques for polyclonal and monoclonal antibody preparation. A full-length TWIK-9 protein can be used or, alternatively, the invention provides antigenic peptide fragments of TWIK-9 for use as immunogens. The antigenic peptide of TWIK-9 comprises at least 8 amino acid residues of the amino acid sequence shown in SEQ ID NO:41 and encompasses an epitope of TWIK-9 such that an antibody raised against the peptide forms a specific immune complex with TWIK-9. Preferably, the antigenic peptide comprises at least 10 amino acid residues, more preferably at least 15 amino acid residues, even more preferably at least 20 amino acid residues, and most preferably at least 30 amino acid residues.

[2191] Preferred epitopes encompassed by the antigenic peptide are regions of TWIK-9 that are located on the surface of the protein, e.g., hydrophilic regions, as well as regions with high antigenicity (see, for example, FIG. 39).

[2192] A TWIK-9 immunogen typically is used to prepare antibodies by immunizing a suitable subject (e.g., rabbit, goat, mouse, or other mammal) with the immunogen. An appropriate immunogenic preparation can contain, for example, recombinantly expressed TWIK-9 protein or a chemically-synthesized TWIK-9 polypeptide. The preparation can further include an adjuvant, such as Freund's complete or incomplete adjuvant, or similar immunostimulatory agent. Immunization of a suitable subject with an immunogenic TWIK-9 preparation induces a polyclonal anti-TWIK-9 antibody response.

[2193] Accordingly, another aspect of the invention pertains to anti-TWIK-9 antibodies. The term “antibody” as used herein refers to immunoglobulin molecules and immunologically active portions of immunoglobulin molecules, i.e., molecules that contain an antigen binding site which specifically binds (immunoreacts with) an antigen, such as TWIK-9. Examples of immunologically active portions of immunoglobulin molecules include F(ab) and F(ab′)₂ fragments which can be generated by treating the antibody with an enzyme such as pepsin. The invention provides polyclonal and monoclonal antibodies that bind TWIK-9. The term “monoclonal antibody” or “monoclonal antibody composition”, as used herein, refers to a population of antibody molecules that contain only one species of an antigen binding site capable of immunoreacting with a particular epitope of TWIK-9. A monoclonal antibody composition thus typically displays a single binding affinity for a particular TWIK-9 protein with which it immunoreacts.

[2194] Polyclonal anti-TWIK-9 antibodies can be prepared as described above by immunizing a suitable subject with a TWIK-9 immunogen. The anti-TWIK-9 antibody titer in the immunized subject can be monitored over time by standard techniques, such as with an enzyme linked immunosorbent assay (ELISA) using immobilized TWIK-9. If desired, the antibody molecules directed against TWIK-9 can be isolated from the mammal (e.g., from the blood) and further purified by well known techniques, such as protein A chromatography to obtain the IgG fraction. At an appropriate time after immunization, e.g., when the anti-TWIK-9 antibody titers are highest, antibody-producing cells can be obtained from the subject and used to prepare monoclonal antibodies by standard techniques, such as the hybridoma technique originally described by Kohler and Milstein (1975) Nature 256:495-497 (see also Brown et al. (1981) J. Immunol. 127:539-46; Brown et al. (1980) J. Biol. Chem. 255:4980-83; Yeh et al. (1976) Proc. Natl. Acad. Sci. USA 76:2927-31; and Yeh et al. (1982) Int. J. Cancer 29:269-75), the more recent human B cell hybridoma technique (Kozbor et al. (1983) Immunol Today 4:72), the EBV-hybridoma technique (Cole et al. (1985), Monoclonal Antibodies and Cancer Therapy, Alan R. Liss, Inc., pp. 77-96) or trioma techniques. The technology for producing monoclonal antibody hybridomas is well known (see generally Kenneth, R. H. in Monoclonal Antibodies: A New Dimension In Biological Analyses, Plenum Publishing Corp., New York, N.Y. (1980); Lerner, E. A. (1981) Yale J. Biol. Med., 54:387-402; Gefter, M. L. et al. (1977) Somatic Cell Genet. 3:231-36). Briefly, an immortal cell line (typically a myeloma) is fused to lymphocytes (typically splenocytes) from a mammal immunized with a TWIK-9 immunogen as described above, and the culture supernatants of the resulting hybridoma cells are screened to identify a hybridoma producing a monoclonal antibody that binds TWIK-9.

[2195] Any of the many well known protocols used for fusing lymphocytes and immortalized cell lines can be applied for the purpose of generating an anti-TWIK-9 monoclonal antibody (see, e.g., Galfre, G. et al. (1977) Nature 266:55052; Gefter et al. Somatic Cell Genet., supra; Lerner (1981) supra; Kenneth, Monoclonal Antibodies, supra). Moreover, the ordinarily skilled worker will appreciate that there are many variations of such methods which also would be useful. Typically, the immortal cell line (e.g., a myeloma cell line) is derived from the same mammalian species as the lymphocytes. For example, murine hybridomas can be made by fusing lymphocytes from a mouse immunized with an immunogenic preparation of the present invention with an immortalized mouse cell line. Preferred immortal cell lines are mouse myeloma cell lines that are sensitive to culture medium containing hypoxanthine, aminopterin and thymidine (“HAT medium”). Any of a number of myeloma cell lines can be used as a fusion partner according to standard techniques, e.g., the P3-NS1/1-Ag4-1, P3-x63-Ag8.653 or Sp2/O-Ag14 myeloma line These myeloma lines are available from ATCC. Typically, HAT-sensitive mouse myeloma cells are fused to mouse splenocytes using polyethylene glycol (“PEG”). Hybridoma cells resulting from the fusion are then selected using HAT medium, which kills unfused and unproductively fused myeloma cells (unfused splenocytes die after several days because they are not transformed). Hybridoma cells producing a monoclonal antibody of the invention are detected by screening the hybridoma culture supernatants for antibodies that bind TWIK-9, e.g, using a standard ELISA assay.

[2196] Alternative to preparing monoclonal antibody-secreting hybridomas, a monoclonal anti-TWIK-9 antibody can be identified and isolated by screening a recombinant combinatorial immunoglobulin library (e.g., an antibody phage display library) with TWIK-9 to thereby isolate immunoglobulin library members that bind TWIK-9. Kits for generating and screening phage display libraries are commercially available (e.g., the Pharmacia Recombinant Phage Antibody System, Catalog No. 27-9400-01; and the Stratagene SurfZAP™ Phage Display Kit, Catalog No. 240612). Additionally, examples of methods and reagents particularly amenable for use in generating and screening antibody display library can be found in, for example, Ladner et al. U.S. Pat. No. 5,223,409; Kang et al. PCT International Publication No. WO 92/18619; Dower et al. PCT International Publication No. WO 91/17271; Winter et al. PCT International Publication WO 92/20791; Markland et al. PCT International Publication No. WO 92/15679; Breitling et al. PCT International Publication WO 93/01288; McCafferty et al. PCT International Publication No. WO 92/01047; Garrard et al. PCT International Publication No. WO 92/09690; Ladner et al. PCT International Publication No. WO 90/02809; Fuchs et al. (1991) Bio/Technology 9:1370-1372; Hay et al. (1992) Hum. Antibod. Hybridomas 3:81-85; Huse et al. (1989) Science 246:1275-1281; Griffiths et al. (1993) EMBO J. 12:725-734; Hawkins et al. (1992) J. Mol. Biol. 226:889-896; Clackson et al. (1991) Nature 352:624-628; Gram et al. (1992) Proc. Natl. Acad. Sci. USA 89:3576-3580; Garrard et al. (1991) Bio/Technology 9:1373-1377; Hoogenboom et al. (1991) Nuc. Acid Res. 19:4133-4137; Barbas et al. (1991) Proc. Natl. Acad. Sci. USA 88:7978-7982; and McCafferty et al. (1990) Nature 348:552-554.

[2197] Additionally, recombinant anti-TWIK-9 antibodies, such as chimeric and humanized monoclonal antibodies, comprising both human and non-human portions, which can be made using standard recombinant DNA techniques, are within the scope of the invention. Such chimeric and humanized monoclonal antibodies can be produced by recombinant DNA techniques known in the art, for example using methods described in Robinson et al. International Application No. PCT/US86/02269; Akira, et al. European Patent Application 184,187; Taniguchi, M., European Patent Application 171,496; Morrison et al. European Patent Application 173,494; Neuberger et al. PCT International Publication No. WO 86/01533; Cabilly et al. U.S. Pat. No. 4,816,567; Cabilly et al. European Patent Application 125,023; Better et al. (1988) Science 240:1041-1043; Liu et al. (1987) Proc. Natl. Acad. Sci. USA 84:3439-3443; Liu et al. (1987) J. Immunol. 139:3521-3526; Sun et al. (1987) Proc. Natl. Acad Sci. USA 84:214-218; Nishimura et al. (1987) Canc. Res. 47:999-1005; Wood et al. (1985) Nature 314:446-449; and Shaw et al. (1988) J. Natl. Cancer Inst. 80:1553-1559); Morrison, S. L. (1985) Science 229:1202-1207; Oi et al. (1986) BioTechniques 4:214; Winter U.S. Pat. No. 5,225,539; Jones et al. (1986) Nature 321:552-525; Verhoeyen et al. (1988) Science 239:1534; and Beidler et al. (1988) J. Immunol. 141:4053-4060.

[2198] An anti-TWIK-9 antibody (e.g., monoclonal antibody) can be used to isolate TWIK-9 by standard techniques, such as affinity chromatography or immunoprecipitation. An anti-TWIK-9 antibody can facilitate the purification of natural TWIK-9 from cells and of recombinantly produced TWIK-9 expressed in host cells. Moreover, an anti-TWIK-9 antibody can be used to detect TWIK-9 protein (e.g., in a cellular lysate or cell supernatant) in order to evaluate the abundance and pattern of expression of the TWIK-9 protein. Anti-TWIK-9 antibodies can be used diagnostically to monitor protein levels in tissue as part of a clinical testing procedure, e.g., to, for example, determine the efficacy of a given treatment regimen. Detection can be facilitated by coupling (i.e., physically linking) the antibody to a detectable substance. Examples of detectable substances include various enzymes, prosthetic groups, fluorescent materials, luminescent materials, bioluminescent materials, and radioactive materials. Examples of suitable enzymes include horseradish peroxidase, alkaline phosphatase, β-galactosidase, or acetylcholinesterase; examples of suitable prosthetic group complexes include streptavidin/biotin and avidin/biotin; examples of suitable fluorescent materials include umbelliferone, fluorescein, fluorescein isothiocyanate, rhodamine, dichlorotriazinylamine fluorescein, dansyl chloride or phycoerythrin; an example of a luminescent material includes luminol; examples of bioluminescent materials include luciferase, luciferin, and aequorin, and examples of suitable radioactive material include ¹²⁵I, ¹³¹I, ³⁵S or ³H.

[2199] III. Recombinant Expression Vectors and Host Cells

[2200] Another aspect of the invention pertains to vectors, for example recombinant expression vectors, containing a TWIK-9 nucleic acid molecule or vectors containing a nucleic acid molecule which encodes a TWIK-9 protein (or a portion thereof). As used herein, the term “vector” refers to a nucleic acid molecule capable of transporting another nucleic acid to which it has been linked. One type of vector is a “plasmid”, which refers to a circular double stranded DNA loop into which additional DNA segments can be ligated. Another type of vector is a viral vector, wherein additional DNA segments can be ligated into the viral genome. Certain vectors are capable of autonomous replication in a host cell into which they are introduced (e.g., bacterial vectors having a bacterial origin of replication and episomal mammalian vectors). Other vectors (e.g., non-episomal mammalian vectors) are integrated into the genome of a host cell upon introduction into the host cell, and thereby are replicated along with the host genome. Moreover, certain vectors are capable of directing the expression of genes to which they are operatively linked. Such vectors are referred to herein as “expression vectors”. In general, expression vectors of utility in recombinant DNA techniques are often in the form of plasmids. In the present specification, “plasmid” and “vector” can be used interchangeably as the plasmid is the most commonly used form of vector. However, the invention is intended to include such other forms of expression vectors, such as viral vectors (e.g., replication defective retroviruses, adenoviruses and adeno-associated viruses), which serve equivalent functions.

[2201] The recombinant expression vectors of the invention comprise a nucleic acid of the invention in a form suitable for expression of the nucleic acid in a host cell, which means that the recombinant expression vectors include one or more regulatory sequences, selected on the basis of the host cells to be used for expression, which is operatively linked to the nucleic acid sequence to be expressed. Within a recombinant expression vector, “operably linked” is intended to mean that the nucleotide sequence of interest is linked to the regulatory sequence(s) in a manner which allows for expression of the nucleotide sequence (e.g, in an in vitro transcription/translation system or in a host cell when the vector is introduced into the host cell). The term “regulatory sequence” is intended to include promoters, enhancers and other expression control elements (e.g., polyadenylation signals). Such regulatory sequences are described, for example, in Goeddel (1990) Methods Enzymol. 185:3-7. Regulatory sequences include those which direct constitutive expression of a nucleotide sequence in many types of host cells and those which direct expression of the nucleotide sequence only in certain host cells (e.g., tissue-specific regulatory sequences). It will be appreciated by those skilled in the art that the design of the expression vector can depend on such factors as the choice of the host cell to be transformed, the level of expression of protein desired, and the like. The expression vectors of the invention can be introduced into host cells to thereby produce proteins or peptides, including fusion proteins or peptides, encoded by nucleic acids as described herein (e.g., TWIK-9 proteins, mutant forms of TWIK-9 proteins, fusion proteins, and the like).

[2202] Accordingly, an exemplary embodiment provides a method for producing a protein, preferably a TWIK-9 protein, by culturing in a suitable medium a host cell of the invention (e.g., a mammalian host cell such as a non-human mammalian cell) containing a recombinant expression vector, such that the protein is produced.

[2203] The recombinant expression vectors of the invention can be designed for expression of TWIK-9 proteins in prokaryotic or eukaryotic cells. For example, TWIK-9 proteins can be expressed in bacterial cells such as E. coli, insect cells (using baculovirus expression vectors) yeast cells or mammalian cells. Suitable host cells are discussed further in Goeddel (1990) supra. Alternatively, the recombinant expression vector can be transcribed and translated in vitro, for example using T7 promoter regulatory sequences and T7 polymerase.

[2204] Expression of proteins in prokaryotes is most often carried out in E. coli with vectors containing constitutive or inducible promoters directing the expression of either fusion or non-fusion proteins. Fusion vectors add a number of amino acids to a protein encoded therein, usually to the amino terminus of the recombinant protein. Such fusion vectors typically serve three purposes: 1) to increase expression of recombinant protein; 2) to increase the solubility of the recombinant protein; and 3) to aid in the purification of the recombinant protein by acting as a ligand in affinity purification. Often, in fusion expression vectors, a proteolytic cleavage site is introduced at the junction of the fusion moiety and the recombinant protein to enable separation of the recombinant protein from the fusion moiety subsequent to purification of the fusion protein. Such enzymes, and their cognate recognition sequences, include Factor Xa, thrombin and enterokinase. Typical fusion expression vectors include pGEX (Pharmacia Biotech Inc; Smith, D. B. and Johnson, K. S. (1988) Gene 67:31-40), pMAL (New England Biolabs, Beverly, Mass.) and pRIT5 (Pharmacia, Piscataway, N.J.) which fuse glutathione S-transferase (GST), maltose E binding protein, or protein A, respectively, to the target recombinant protein.

[2205] Purified fusion proteins can be utilized in TWIK-9 activity assays, (e.g., direct assays or competitive assays described in detail below), or to generate antibodies specific for TWIK-9 proteins, for example. In a preferred embodiment, a TWIK-9 fusion protein expressed in a retroviral expression vector of the present invention can be utilized to infect bone marrow cells, which are subsequently transplanted into irradiated recipients. The pathology of the subject recipient is then examined after sufficient time has passed (e.g., six (6) weeks).

[2206] Examples of suitable inducible non-fusion E. coli expression vectors include pTrc (Amann et al., (1988) Gene 69:301-315) and pET 11d (Studier et al. (1990) Methods Enzymol. 185:60-89). Target gene expression from the pTrc vector relies on host RNA polymerase transcription from a hybrid trp-lac fusion promoter. Target gene expression from the pET 11d vector relies on transcription from a T7 gn10-lac fusion promoter mediated by a coexpressed viral RNA polymerase (T7 gn1). This viral polymerase is supplied by host strains BL21(DE3) or HMS174(DE3) from a resident prophage harboring a T7 gn1 gene under the transcriptional control of the lacUV 5 promoter.

[2207] One strategy to maximize recombinant protein expression in E. coli is to express the protein in a host bacteria with an impaired capacity to proteolytically cleave the recombinant protein (Gottesman, S. (1990) Methods Enzymol. 185:119-128). Another strategy is to alter the nucleic acid sequence of the nucleic acid to be inserted into an expression vector so that the individual codons for each amino acid are those preferentially utilized in E. coli (Wada et al. (1992) Nucleic Acids Res. 20:2111-2118). Such alteration of nucleic acid sequences of the invention can be carried out by standard DNA synthesis techniques.

[2208] In another embodiment, the TWIK-9 expression vector is a yeast expression vector. Examples of vectors for expression in yeast S. cerivisae include pYepSec1 (Baldari, et al. (1987) EMBO J. 6:229-234), pMFa (Kurjan and Herskowitz (1982) Cell 30:933-943), pJRY88 (Schultz et al. (1987) Gene 54:113-123), pYES2 (Invitrogen Corporation, San Diego, Calif.), and picZ (Invitrogen Corporation, San Diego, Calif.).

[2209] Alternatively, TWIK-9 proteins can be expressed in insect cells using baculovirus expression vectors. Baculovirus vectors available for expression of proteins in cultured insect cells (e.g., Sf 9 cells) include the pAc series (Smith et al. (1983) Mol. Cell Biol. 3:2156-2165) and the pVL series (Lucklow and Summers (1989) Virology 170:31-39).

[2210] In yet another embodiment, a nucleic acid of the invention is expressed in mammalian cells using a mammalian expression vector. Examples of mammalian expression vectors include pCDM8 (Seed, B. (1987) Nature 329:840) and pMT2PC (Kaufman et al. (1987) EMBO J. 6:187-195). When used in mammalian cells, the expression vector's control functions are often provided by viral regulatory elements. For example, commonly used promoters are derived from polyoma, Adenovirus 2, cytomegalovirus and Simian Virus 40. For other suitable expression systems for both prokaryotic and eukaryotic cells see chapters 16 and 17 of Sambrook, J. et al. Molecular Cloning: A Laboratory Manual. 2^{nd}, ed., Cold Spring Harbor Laboratory, Cold Spring Harbor Laboratory Press, Cold Spring Harbor, N.Y., 1989.

[2211] In another embodiment, the recombinant mammalian expression vector is capable of directing expression of the nucleic acid preferentially in a particular cell type (e.g., tissue-specific regulatory elements are used to express the nucleic acid). Tissue-specific regulatory elements are known in the art. Non-limiting examples of suitable tissue-specific promoters include the alpha-myosin heavy chain promoter (cardiac specific), albumin promoter (liver-specific; Pinkert et al. (1987) Genes Dev. 1:268-277), lymphoid-specific promoters (Calame and Eaton (1988) Adv. Immunol. 43:235-275), in particular promoters of T cell receptors (Winoto and Baltimore (1989) EMBO J. 8:729-733) and immunoglobulins (Banerji et al. (1983) Cell 33:729-740; Queen and Baltimore (1983) Cell 33:741-748), neuron-specific promoters (e.g., the neurofilament promoter; Byrne and Ruddle (1989) Proc. Natl. Acad. Sci. USA 86:5473-5477), pancreas-specific promoters (Edlund et al. (1985) Science 230:912-916), adipose-specific promoters (U.S. Pat. No. 5,476,926; WO 92/06104), and mammary gland-specific promoters (e.g., milk whey promoter; U.S. Pat. No. 4,873,316 and European Application Publication No. 264,166). Developmentally-regulated promoters are also encompassed, for example the murine hox promoters (Kessel and Gruss (1990) Science 249:374-379) and the □-fetoprotein promoter (Campes and Tilghman (1989) Genes Dev. 3:537-546).

[2212] The invention further provides a recombinant expression vector comprising a DNA molecule of the invention cloned into the expression vector in an antisense orientation. That is, the DNA molecule is operatively linked to a regulatory sequence in a manner which allows for expression (by transcription of the DNA molecule) of an RNA molecule which is antisense to TWIK-9 mRNA. Regulatory sequences operatively linked to a nucleic acid cloned in the antisense orientation can be chosen which direct the continuous expression of the antisense RNA molecule in a variety of cell types, for instance viral promoters and/or enhancers, or regulatory sequences can be chosen which direct constitutive, tissue specific or cell type specific expression of antisense RNA. The antisense expression vector can be in the form of a recombinant plasmid, phagemid or attenuated virus in which antisense nucleic acids are produced under the control of a high efficiency regulatory region, the activity of which can be determined by the cell type into which the vector is introduced. For a discussion of the regulation of gene expression using antisense genes see Weintraub, H. et al., “Antisense RNA as a molecular tool for genetic analysis”, Reviews—Trends in Genetics, Vol. 1(1) 1986.

[2213] Another aspect of the invention pertains to host cells into which a TWIK-9 nucleic acid molecule of the invention is introduced, e.g., a TWIK-9 nucleic acid molecule within a vector (e.g, a recombinant expression vector) or a TWIK-9 nucleic acid molecule containing sequences which allow it to homologously recombine into a specific site of the host cell's genome. The terms “host cell” and “recombinant host cell” are used interchangeably herein. It is understood that such terms refer not only to the particular subject cell but to the progeny or potential progeny of such a cell. Because certain modifications may occur in succeeding generations due to either mutation or environmental influences, such progeny may not, in fact, be identical to the parent cell, but are still included within the scope of the term as used herein.

[2214] A host cell can be any prokaryotic or eukaryotic cell. For example, a TWIK-9 protein can be expressed in bacterial cells such as E. coli, insect cells, yeast or mammalian cells (such as Chinese hamster ovary cells (CHO) or COS cells). Other suitable host cells are known to those skilled in the art.

[2215] Vector DNA can be introduced into prokaryotic or eukaryotic cells via conventional transformation or transfection techniques. As used herein, the terms “transformation” and “transfection” are intended to refer to a variety of art-recognized techniques for introducing foreign nucleic acid (e.g., DNA) into a host cell, including calcium phosphate or calcium chloride co-precipitation, DEAE-dextran-mediated transfection, lipofection, or electroporation. Suitable methods for transforming or transfecting host cells can be found in Sambrook, et al. (Molecular Cloning: A Laboratory Manual. 2^{nd}, ed., Cold Spring Harbor Laboratory, Cold Spring Harbor Laboratory Press, Cold Spring Harbor, N.Y., 1989), and other laboratory manuals.

[2216] For stable transfection of mammalian cells, it is known that, depending upon the expression vector and transfection technique used, only a small fraction of cells may integrate the foreign DNA into their genome. In order to identify and select these integrants, a gene that encodes a selectable marker (e.g., resistance to antibiotics) is generally introduced into the host cells along with the gene of interest. Preferred selectable markers include those which confer resistance to drugs, such as G418, hygromycin and methotrexate. Nucleic acid encoding a selectable marker can be introduced into a host cell on the same vector as that encoding a TWIK-9 protein or can be introduced on a separate vector. Cells stably transfected with the introduced nucleic acid can be identified by drug selection (e.g., cells that have incorporated the selectable marker gene will survive, while the other cells die).

[2217] A host cell of the invention, such as a prokaryotic or eukaryotic host cell in culture, can be used to produce (i.e., express) a TWIK-9 protein. Accordingly, the invention further provides methods for producing a TWIK-9 protein using the host cells of the invention. In one embodiment, the method comprises culturing the host cell of the invention (into which a recombinant expression vector encoding a TWIK-9 protein has been introduced) in a suitable medium such that a TWIK-9 protein is produced. In another embodiment, the method further comprises isolating a TWIK-9 protein from the medium or the host cell.

[2218] The host cells of the invention can also be used to produce non-human transgenic animals. For example, in one embodiment, a host cell of the invention is a fertilized oocyte or an embryonic stem cell into which TWIK-9-coding sequences have been introduced. Such host cells can then be used to create non-human transgenic animals in which exogenous TWIK-9 sequences have been introduced into their genome or homologous recombinant animals in which endogenous TWIK-9 sequences have been altered. Such animals are useful for studying the function and/or activity of a TWIK-9 protein and for identifying and/or evaluating modulators of TWIK-9 activity. As used herein, a “transgenic animal” is a non-human animal, preferably a mammal, more preferably a rodent such as a rat or mouse, in which one or more of the cells of the animal includes a transgene. Other examples of transgenic animals include non-human primates, sheep, dogs, cows, goats, chickens, amphibians, and the like. A transgene is exogenous DNA which is integrated into the genome of a cell from which a transgenic animal develops and which remains in the genome of the mature animal, thereby directing the expression of an encoded gene product in one or more cell types or tissues of the transgenic animal. As used herein, a “homologous recombinant animal” is a non-human animal, preferably a mammal, more preferably a mouse, in which an endogenous TWIK-9 gene has been altered by homologous recombination between the endogenous gene and an exogenous DNA molecule introduced into a cell of the animal, e.g., an embryonic cell of the animal, prior to development of the animal.

[2219] A transgenic animal of the invention can be created by introducing a TWIK-9-encoding nucleic acid into the male pronuclei of a fertilized oocyte, e.g., by microinjection or retroviral infection, and allowing the oocyte to develop in a pseudopregnant female foster animal. The TWIK-9 cDNA sequence of SEQ ID NO:40 can be introduced as a transgene into the genome of a non-human animal. Alternatively, a non-human homologue of a human TWIK-9 gene, such as a rat or mouse TWIK-9 gene, can be used as a transgene. Alternatively, a TWIK-9 gene homologue, such as another TWIK-9 family member, can be isolated based on hybridization to the TWIK-9 cDNA sequences of SEQ ID NO:40 or 42, or the DNA insert of the plasmid deposited with ATCC as Accession Number ______ (described further in subsection I above) and used as a transgene. Intronic sequences and polyadenylation signals can also be included in the transgene to increase the efficiency of expression of the transgene. A tissue-specific regulatory sequence(s) can be operably linked to a TWIK-9 transgene to direct expression of a TWIK-9 protein to particular cells. Methods for generating transgenic animals via embryo manipulation and microinjection, particularly animals such as mice, have become conventional in the art and are described, for example, in U.S. Pat. Nos. 4,736,866 and 4,870,009, both by Leder et al., U.S. Pat. No. 4,873,191 by Wagner et al. and in Hogan, B., Manipulating the Mouse Embryo, (Cold Spring Harbor Laboratory Press, Cold Spring Harbor, N.Y., 1986). Similar methods are used for production of other transgenic animals. A transgenic founder animal can be identified based upon the presence of a TWIK-9 transgene in its genome and/or expression of TWIK-9 mRNA in tissues or cells of the animals. A transgenic founder animal can then be used to breed additional animals carrying the transgene. Moreover, transgenic animals carrying a transgene encoding a TWIK-9 protein can further be bred to other transgenic animals carrying other transgenes.

[2220] To create a homologous recombinant animal, a vector is prepared which contains at least a portion of a TWIK-9 gene into which a deletion, addition or substitution has been introduced to thereby alter, e.g., functionally disrupt, the TWIK-9 gene. The TWIK-9 gene can be a human gene (e.g., the cDNA of SEQ ID NO:42), but more preferably, is a non-human homologue of a human TWIK-9 gene (e.g., a cDNA isolated by stringent hybridization with the nucleotide sequence of SEQ ID NO:40), For example, a mouse TWIK-9 gene can be used to construct a homologous recombination nucleic acid molecule, e.g., a vector, suitable for altering an endogenous TWIK-9 gene in the mouse genome. In a preferred embodiment, the homologous recombination nucleic acid molecule is designed such that, upon homologous recombination, the endogenous TWIK-9 gene is functionally disrupted (i.e., no longer encodes a functional protein; also referred to as a “knock out” vector). Alternatively, the homologous recombination nucleic acid molecule can be designed such that, upon homologous recombination, the endogenous TWIK-9 gene is mutated or otherwise altered but still encodes functional protein (e.g., the upstream regulatory region can be altered to thereby alter the expression of the endogenous TWIK-9 protein). In the homologous recombination nucleic acid molecule, the altered portion of the TWIK-9 gene is flanked at its 5′ and 3′ ends by additional nucleic acid sequence of the TWIK-9 gene to allow for homologous recombination to occur between the exogenous TWIK-9 gene carried by the homologous recombination nucleic acid molecule and an endogenous TWIK-9 gene in a cell, e.g., an embryonic stem cell. The additional flanking TWIK-9 nucleic acid sequence is of sufficient length for successful homologous recombination with the endogenous gene. Typically, several kilobases of flanking DNA (both at the 5′ and 3′ ends) are included in the homologous recombination nucleic acid molecule (see, e.g., Thomas, K. R. and Capecchi, M. R. (1987) Cell 51:503 for a description of homologous recombination vectors). The homologous recombination nucleic acid molecule is introduced into a cell, e.g., an embryonic stem cell line (e.g., by electroporation) and cells in which the introduced TWIK-9 gene has homologously recombined with the endogenous TWIK-9 gene are selected (see e.g., Li, E. et al. (1992) Cell 69:915). The selected cells can then be injected into a blastocyst of an animal (e.g., a mouse) to form aggregation chimeras (see e.g., Bradley, A. in Teratocarcinomas and Embryonic Stem Cells: A Practical Approach, Robertson, E. J. ed. (IRL, Oxford, 1987) pp. 113-152). A chimeric embryo can then be implanted into a suitable pseudopregnant female foster animal and the embryo brought to term. Progeny harboring the homologously recombined DNA in their germ cells can be used to breed animals in which all cells of the animal contain the homologously recombined DNA by germline transmission of the transgene. Methods for constructing homologous recombination nucleic acid molecules, e.g., vectors, or homologous recombinant animals are described further in Bradley, A. (1991) Current Opinion in Biotechnology 2:823-829 and in PCT International Publication Nos.: WO 90/11354 by Le Mouellec et al.; WO 91/01140 by Smithies et al.; WO 92/0968 by Zijlstra et al.; and WO 93/04169 by Berns et al.

[2221] In another embodiment, transgenic non-humans animals can be produced which contain selected systems which allow for regulated expression of the transgene. One example of such a system is the cre/loxP recombinase system of bacteriophage P1. For a description of the cre/loxP recombinase system, see, e.g., Lakso et al. (1992) Proc. Natl. Acad. Sci. USA 89:6232-6236. Another example of a recombinase system is the FLP recombinase system of Saccharomyces cerevisiae (O'Gorman et al. (1991) Science 251:1351-1355). If a cre/loxP recombinase system is used to regulate expression of the transgene, animals containing transgenes encoding both the Cre recombinase and a selected protein are required. Such animals can be provided through the construction of “double” transgenic animals, e.g., by mating two transgenic animals, one containing a transgene encoding a selected protein and the other containing a transgene encoding a recombinase.

[2222] Clones of the non-human transgenic animals described herein can also be produced according to the methods described in Wilmut, I. et al. (1997) Nature 385:810-813 and PCT International Publication Nos. WO 97/07668 and WO 97/07669. In brief, a cell, e.g., a somatic cell, from the transgenic animal can be isolated and induced to exit the growth cycle and enter G_{O} phase. The quiescent cell can then be fused, e.g., through the use of electrical pulses, to an enucleated oocyte from an animal of the same species from which the quiescent cell is isolated. The reconstructed oocyte is then cultured such that it develops to morula or blastocyte and then transferred to pseudopregnant female foster animal. The offspring borne of this female foster animal will be a clone of the animal from which the cell, e.g., the somatic cell, is isolated.

[2223] IV. Pharmaceutical Compositions

[2224] The TWIK-9 nucleic acid molecules, TWIK-9 proteins, fragments thereof, anti-TWIK-9 antibodies, and TWIK-9 modulators (also referred to herein as “active compounds”) of the invention can be incorporated into pharmaceutical compositions suitable for administration. Such compositions typically comprise the nucleic acid molecule, protein, or antibody and a pharmaceutically acceptable carrier. As used herein the language “pharmaceutically acceptable carrier” is intended to include any and all solvents, dispersion media, coatings, antibacterial and antifungal agents, isotonic and absorption delaying agents, and the like, compatible with pharmaceutical administration. The use of such media and agents for pharmaceutically active substances is well known in the art. Except insofar as any conventional media or agent is incompatible with the active compound, use thereof in the compositions is contemplated. Supplementary active compounds can also be incorporated into the compositions.

[2225] A pharmaceutical composition of the invention is formulated to be compatible with its intended route of administration. Examples of routes of administration include parenteral, e.g., intravenous, intradermal, subcutaneous, oral (e.g., inhalation), transdermal (topical), transmucosal, and rectal administration. Solutions or suspensions used for parenteral, intradermal, or subcutaneous application can include the following components: a sterile diluent such as water for injection, saline solution, fixed oils, polyethylene glycols, glycerine, propylene glycol or other synthetic solvents; antibacterial agents such as benzyl alcohol or methyl parabens; antioxidants such as ascorbic acid or sodium bisulfite; chelating agents such as ethylenediaminetetraacetic acid; buffers such as acetates, citrates or phosphates and agents for the adjustment of tonicity such as sodium chloride or dextrose. pH can be adjusted with acids or bases, such as hydrochloric acid or sodium hydroxide. The parenteral preparation can be enclosed in ampoules, disposable syringes or multiple dose vials made of glass or plastic.

[2226] Pharmaceutical compositions suitable for injectable use include sterile aqueous solutions (where water soluble) or dispersions and sterile powders for the extemporaneous preparation of sterile injectable solutions or dispersion. For intravenous administration, suitable carriers include physiological saline, bacteriostatic water, Cremophor EL™ (BASF, Parsippany, N.J.) or phosphate buffered saline (PBS). In all cases, the composition must be sterile and should be fluid to the extent that easy syringeability exists. It must be stable under the conditions of manufacture and storage and must be preserved against the contaminating action of microorganisms such as bacteria and fungi. The carrier can be a solvent or dispersion medium containing, for example, water, ethanol, polyol (for example, glycerol, propylene glycol, and liquid polyetheylene glycol, and the like), and suitable mixtures thereof. The proper fluidity can be maintained, for example, by the use of a coating such as lecithin, by the maintenance of the required particle size in the case of dispersion and by the use of surfactants. Prevention of the action of microorganisms can be achieved by various antibacterial and antifungal agents, for example, parabens, chlorobutanol, phenol, ascorbic acid, thimerosal, and the like. In many cases, it will be preferable to include isotonic agents, for example, sugars, polyalcohols such as manitol, sorbitol, sodium chloride in the composition. Prolonged absorption of the injectable compositions can be brought about by including in the composition an agent which delays absorption, for example, aluminum monostearate and gelatin.

[2227] Sterile injectable solutions can be prepared by incorporating the active compound (e.g., a fragment of a TWIK-9 protein or an anti-TWIK-9 antibody) in the required amount in an appropriate solvent with one or a combination of ingredients enumerated above, as required, followed by filtered sterilization. Generally, dispersions are prepared by incorporating the active compound into a sterile vehicle which contains a basic dispersion medium and the required other ingredients from those enumerated above. In the case of sterile powders for the preparation of sterile injectable solutions, the preferred methods of preparation are vacuum drying and freeze-drying which yields a powder of the active ingredient plus any additional desired ingredient from a previously sterile-filtered solution thereof.

[2228] Oral compositions generally include an inert diluent or an edible carrier. They can be enclosed in gelatin capsules or compressed into tablets. For the purpose of oral therapeutic administration, the active compound can be incorporated with excipients and used in the form of tablets, troches, or capsules. oral compositions can also be prepared using a fluid carrier for use as a mouthwash, wherein the compound in the fluid carrier is applied orally and swished and expectorated or swallowed. Pharmaceutically compatible binding agents, and/or adjuvant materials can be included as part of the composition. The tablets, pills, capsules, troches and the like can contain any of the following ingredients, or compounds of a similar nature: a binder such as microcrystalline cellulose, gum tragacanth or gelatin; an excipient such as starch or lactose, a disintegrating agent such as alginic acid, Primogel, or corn starch; a lubricant such as magnesium stearate or Sterotes; a glidant such as colloidal silicon dioxide; a sweetening agent such as sucrose or saccharin; or a flavoring agent such as peppermint, methyl salicylate, or orange flavoring.

[2229] For administration by inhalation, the compounds are delivered in the form of an aerosol spray from pressured container or dispenser which contains a suitable propellant, e.g., a gas such as carbon dioxide, or a nebulizer.

[2230] Systemic administration can also be by transmucosal or transdermal means. For transmucosal or transdermal administration, penetrants appropriate to the barrier to be permeated are used in the formulation. Such penetrants are generally known in the art, and include, for example, for transmucosal administration, detergents, bile salts, and fusidic acid derivatives. Transmucosal administration can be accomplished through the use of nasal sprays or suppositories. For transdermal administration, the active compounds are formulated into ointments, salves, gels, or creams as generally known in the art.

[2231] The compounds can also be prepared in the form of suppositories (e.g., with conventional suppository bases such as cocoa butter and other glycerides) or retention enemas for rectal delivery.

[2232] In one embodiment, the active compounds are prepared with carriers that will protect the compound against rapid elimination from the body, such as a controlled release formulation, including implants and microencapsulated delivery systems. Biodegradable, biocompatible polymers can be used, such as ethylene vinyl acetate, polyanhydrides, polyglycolic acid, collagen, polyorthoesters, and polylactic acid. Methods for preparation of such formulations will be apparent to those skilled in the art. The materials can also be obtained commercially from Alza Corporation and Nova Pharmaceuticals, Inc. Liposomal suspensions (including liposomes targeted to infected cells with monoclonal antibodies to viral antigens) can also be used as pharmaceutically acceptable carriers. These can be prepared according to methods known to those skilled in the art, for example, as described in U.S. Pat. No. 4,522,811.

[2233] It is especially advantageous to formulate oral or parenteral compositions in dosage unit form for ease of administration and uniformity of dosage. Dosage unit form as used herein refers to physically discrete units suited as unitary dosages for the subject to be treated; each unit containing a predetermined quantity of active compound calculated to produce the desired therapeutic effect in association with the required pharmaceutical carrier. The specification for the dosage unit forms of the invention are dictated by and directly dependent on the unique characteristics of the active compound and the particular therapeutic effect to be achieved, and the limitations inherent in the art of compounding such an active compound for the treatment of individuals.

[2234] Toxicity and therapeutic efficacy of such compounds can be determined by standard pharmaceutical procedures in cell cultures or experimental animals, e.g., for determining the LD50 (the dose lethal to 50% of the population) and the ED50 (the dose therapeutically effective in 50% of the population). The dose ratio between toxic and therapeutic effects is the therapeutic index and it can be expressed as the ratio LD50/ED50. Compounds which exhibit large therapeutic indices are preferred. While compounds that exhibit toxic side effects may be used, care should be taken to design a delivery system that targets such compounds to the site of affected tissue in order to minimize potential damage to uninfected cells and, thereby, reduce side effects.

[2235] The data obtained from the cell culture assays and animal studies can be used in formulating a range of dosage for use in humans. The dosage of such compounds lies preferably within a range of circulating concentrations that include the ED50 with little or no toxicity. The dosage may vary within this range depending upon the dosage form employed and the route of administration utilized. For any compound used in the method of the invention, the therapeutically effective dose can be estimated initially from cell culture assays. A dose may be formulated in animal models to achieve a circulating plasma concentration range that includes the IC50 (i.e., the concentration of the test compound which achieves a half-maximal inhibition of symptoms) as determined in cell culture. Such information can be used to more accurately determine useful doses in humans. Levels in plasma may be measured, for example, by high performance liquid chromatography.

[2236] As defined herein, a therapeutically effective amount of protein or polypeptide (i.e., an effective dosage) ranges from about 0.001 to 30 mg/kg body weight, preferably about 0.01 to 25 mg/kg body weight, more preferably about 0.1 to 20 mg/kg body weight, and even more preferably about 1 to 10 mg/kg, 2 to 9 mg/kg, 3 to 8 mg/kg, 4 to 7 mg/kg, or 5 to 6 mg/kg body weight. The skilled artisan will appreciate that certain factors may influence the dosage required to effectively treat a subject, including but not limited to the severity of the disease or disorder, previous treatments, the general health and/or age of the subject, and other diseases present. Moreover, treatment of a subject with a therapeutically effective amount of a protein, polypeptide, or antibody can include a single treatment or, preferably, can include a series of treatments.

[2237] In a preferred example, a subject is treated with antibody, protein, or polypeptide in the range of between about 0.1 to 20 mg/kg body weight, one time per week for between about 1 to 10 weeks, preferably between 2 to 8 weeks, more preferably between about 3 to 7 weeks, and even more preferably for about 4, 5, or 6 weeks. It will also be appreciated that the effective dosage of antibody, protein, or polypeptide used for treatment may increase or decrease over the course of a particular treatment. Changes in dosage may result and become apparent from the results of diagnostic assays as described herein.

[2238] The present invention encompasses agents which modulate expression or activity. An agent may, for example, be a small molecule. For example, such small molecules include, but are not limited to, peptides, peptidomimetics, amino acids, amino acid analogs, polynucleotides, polynucleotide analogs, nucleotides, nucleotide analogs, organic or inorganic compounds (i.e., including heteroorganic and organometallic compounds) having a molecular weight less than about 10,000 grams per mole, organic or inorganic compounds having a molecular weight less than about 5,000 grams per mole, organic or inorganic compounds having a molecular weight less than about 1,000 grams per mole, organic or inorganic compounds having a molecular weight less than about 500 grams per mole, and salts, esters, and other pharmaceutically acceptable forms of such compounds. It is understood that appropriate doses of small molecule agents depends upon a number of factors within the ken of the ordinarily skilled physician, veterinarian, or researcher. The dose(s) of the small molecule will vary, for example, depending upon the identity, size, and condition of the subject or sample being treated, further depending upon the route by which the composition is to be administered, if applicable, and the effect which the practitioner desires the small molecule to have upon the nucleic acid or polypeptide of the invention.

[2239] Exemplary doses include milligram or microgram amounts of the small molecule per kilogram of subject or sample weight (e.g., about 1 microgram per kilogram to about 500 milligrams per kilogram, about 100 micrograms per kilogram to about 5 milligrams per kilogram, or about 1 microgram per kilogram to about 50 micrograms per kilogram. It is furthermore understood that appropriate doses of a small molecule depend upon the potency of the small molecule with respect to the expression or activity to be modulated. Such appropriate doses may be determined using the assays described herein. When one or more of these small molecules is to be administered to an animal (e.g., a human) in order to modulate expression or activity of a polypeptide or nucleic acid of the invention, a physician, veterinarian, or researcher may, for example, prescribe a relatively low dose at first, subsequently increasing the dose until an appropriate response is obtained. In addition, it is understood that the specific dose level for any particular animal subject will depend upon a variety of factors including the activity of the specific compound employed, the age, body weight, general health, gender, and diet of the subject, the time of administration, the route of administration, the rate of excretion, any drug combination, and the degree of expression or activity to be modulated.

[2240] In certain embodiments of the invention, a modulator of TWIK-9 activity is administered in combination with other agents (e.g., a small molecule), or in conjunction with another, complementary treatment regime. For example, in one embodiment, a modulator of TWIK-9 activity is used to treat a central nervous system disorder. Accordingly, modulation of TWIK-9 activity may be used in conjunction with, for example, neuroactive and/or neurotrophic agents.

[2241] Further, an antibody (or fragment thereof) may be conjugated to a therapeutic moiety such as a cytotoxin, a therapeutic agent or a radioactive metal ion. A cytotoxin or cytotoxic agent includes any agent that is detrimental to cells. Examples include taxol, cytochalasin B, gramicidin D, ethidium bromide, emetine, mitomycin, etoposide, tenoposide, vincristine, vinblastine, colchicin, doxorubicin, daunorubicin, dihydroxy anthracin dione, mitoxantrone, mithramycin, actinomycin D, 1-dehydrotestosterone, glucocorticoids, procaine, tetracaine, lidocaine, propranolol, and puromycin and analogs or homologs thereof. Therapeutic agents include, but are not limited to, antimetabolites (e.g., methotrexate, 6-mercaptopurine, 6-thioguanine, cytarabine, 5-fluorouracil decarbazine), alkylating agents (e.g., mechlorethamine, thioepa chlorambucil, melphalan, carmustine (BSNU) and lomustine (CCNU), cyclothosphamide, busulfan, dibromomannitol, streptozotocin, mitomycin C, and cis-dichlorodiamine platinum (II) (DDP) cisplatin), anthracyclines (e.g., daunorubicin (formerly daunomycin) and doxorubicin), antibiotics (e.g., dactinomycin (formerly actinomycin), bleomycin, mithramycin, and anthramycin (AMC)), and anti-mitotic agents (e.g., vincristine and vinblastine).

[2242] The conjugates of the invention can be used for modifying a given biological response, the drug moiety is not to be construed as limited to classical chemical therapeutic agents. For example, the drug moiety may be a protein or polypeptide possessing a desired biological activity. Such proteins may include, for example, a toxin such as abrin, ricin A, pseudomonas exotoxin, or diphtheria toxin; a protein such as tumor necrosis factor, alpha-interferon, beta-interferon, nerve growth factor, platelet derived growth factor, tissue plasminogen activator; or, biological response modifiers such as, for example, lymphokines, interleukin-1 (“IL-1”), interleukin-2 (“IL-2”), interleukin-6 (“IL-6”), granulocyte macrophage colony stimulating factor (“GM-CSF”), granulocyte colony stimulating factor (“G-CSF”), or other growth factors.

[2243] Techniques for conjugating such therapeutic moiety to antibodies are well known, see, e.g., Arnon et al., “Monoclonal Antibodies For Immunotargeting Of Drugs In Cancer Therapy”, in Monoclonal Antibodies And Cancer Therapy, Reisfeld et al. (eds.), pp. 243-56 (Alan R. Liss, Inc. 1985); Hellstrom et al., “Antibodies For Drug Delivery”, in Controlled Drug Delivery (2nd Ed.), Robinson et al. (eds.), pp. 623-53 (Marcel Dekker, Inc. 1987); Thorpe, “Antibody Carriers Of Cytotoxic Agents In Cancer Therapy: A Review”, in Monoclonal Antibodies '84: Biological And Clinical Applications, Pinchera et al. (eds.), pp. 475-506 (1985); “Analysis, Results, And Future Prospective Of The Therapeutic Use Of Radiolabeled Antibody In Cancer Therapy”, in Monoclonal Antibodies For Cancer Detection And Therapy, Baldwin et al. (eds.), pp. 303-16 (Academic Press 1985), and Thorpe et al., “The Preparation And Cytotoxic Properties Of Antibody-Toxin Conjugates”, Immunol. Rev., 62:119-58 (1982). Alternatively, an antibody can be conjugated to a second antibody to form an antibody heteroconjugate as described by Segal in U.S. Pat. No. 4,676,980.

[2244] The nucleic acid molecules of the invention can be inserted into vectors and used as gene therapy vectors. Gene therapy vectors can be delivered to a subject by, for example, intravenous injection, local administration (see U.S. Pat. No. 5,328,470) or by stereotactic injection (see e.g., Chen et al. (1994) Proc. Natl. Acad. Sci. USA 91:3054-3057). The pharmaceutical preparation of the gene therapy vector can include the gene therapy vector in an acceptable diluent, or can comprise a slow release matrix in which the gene delivery vehicle is imbedded. Alternatively, where the complete gene delivery vector can be produced intact from recombinant cells, e.g., retroviral vectors, the pharmaceutical preparation can include one or more cells which produce the gene delivery system.

[2245] The pharmaceutical compositions can be included in a container, pack, or dispenser together with instructions for administration.

[2246] V. Uses and Methods of the Invention

[2247] The nucleic acid molecules, proteins, protein homologues, protein fragments, antibodies, peptides, peptidomimetics, and small molecules described herein can be used in one or more of the following methods: a) screening assays; b) predictive medicine (e.g., diagnostic assays, prognostic assays, monitoring clinical trials, and pharmacogenetics); and c) methods of treatment (e.g., therapeutic and prophylactic). As described herein, a TWIK-9 protein of the invention has one or more of the following activities: (1) interacting with a non-TWIK protein molecule; (2) activating a TWIK-dependent signal transduction pathway; (3) modulating the release of neurotransmitters; (4) modulating membrane excitability; (5) influencing the resting potential of membranes, wave forms and frequencies of action potentials, and thresholds of excitation, (6) modulating processes which underlie learning and memory, such as integration of sub-threshold synaptic responses and the conductance of back-propagating action potentials, and (7) mediating nociception.

[2248] The isolated nucleic acid molecules of the invention can be used, for example, to express TWIK-9 protein (e.g., via a recombinant expression vector in a host cell in gene therapy applications), to detect TWIK-9 mRNA (e.g., in a biological sample) or a genetic alteration in a TWIK-9 gene, and to modulate TWIK-9 activity, as described further below. The TWIK-9 proteins can be used to treat disorders characterized by insufficient or excessive production of a TWIK-9 ligand or substrate, or production of TWIK-9 inhibitors, for example, potassium channel associated disorders.

[2249] As used interchangeably herein, an “potassium channel-associated disorder” or a “TWIK-9-associated disorder” includes a disorder, disease or condition which is caused or characterized by a misregulation (e.g., downregulation or upregulation) of a potassium channel activity or a TWIK-9-mediated activity. Potassium channel-associated disorders can detrimentally affect cellular functions such as cellular proliferation, growth, differentiation, and/or migration; inter- or intra-cellular communication; tissue function, such as muscular function or cardiac function; systemic responses in an organism, such as nervous system responses.

[2250] Examples of potassium channel associated disorders include central nervous system (CNS) disorders such as cognitive and neurodegenerative disorders, examples of which include, but are not limited to, Alzheimer's disease, dementias related to Alzheimer's disease (such as Pick's disease), Parkinson's and other Lewy diffuse body diseases, senile dementia, Huntington's disease, Gilles de la Tourette's syndrome, multiple sclerosis, amyotrophic lateral sclerosis, movement disorders, progressive supranuclear palsy, epilepsy, AIDS related dementia, and Jakob-Creutzfieldt disease; autonomic function disorders such as hypertension and sleep disorders, and neuropsychiatric disorders, such as depression, schizophrenia, schizoaffective disorder, korsakoff's psychosis, mania, anxiety disorders, or phobic disorders; learning or memory disorders, e.g., amnesia or age-related memory loss, attention deficit disorder, dysthymic disorder, major depressive disorder, mania, obsessive-compulsive disorder, psychoactive substance use disorders, anxiety, phobias, panic disorder, as well as bipolar affective disorder, e.g., severe bipolar affective (mood) disorder (BP-1), and bipolar affective neurological disorders, e.g., migraine and obesity. Further CNS-related disorders include, for example, those listed in the American Psychiatric Association's Diagnostic and Statistical manual of Mental Disorders (DSM), the most current version of which is incorporated herein by reference in its entirety.

[2251] Further examples of potassium channel associated disorders include cardiac-related disorders. Cardiovascular system disorders in which the TWIK-9 molecules of the invention may be directly or indirectly involved include arteriosclerosis, ischemia reperfusion injury, restenosis, arterial inflammation, vascular wall remodeling, ventricular remodeling, rapid ventricular pacing, coronary microembolism, tachycardia, bradycardia, pressure overload, aortic bending, coronary artery ligation, vascular heart disease, atrial fibrilation, Jervell syndrome, Lange-Nielsen syndrome, long-QT syndrome, congestive heart failure, sinus node dysfunction, angina, heart failure, hypertension, atrial fibrillation, atrial flutter, dilated cardiomyopathy, idiopathic cardiomyopathy, myocardial infarction, coronary artery disease, cerebral ischemia, stroke, coronary artery spasm, and arrhythmia. TWIK-9-mediated or related disorders also include disorders of the musculoskeletal system such as paralysis and muscle weakness, e.g., ataxia, myotonia, and myokymia.

[2252] Further disorders in which the TWIK-9 molecules of the invention may be involved are pain disorders. Pain disorders include those that affect pain signaling mechanisms. As used herein, the term “pain signaling mechanisms” includes the cellular mechanisms involved in the development and regulation of pain, e.g., pain elicited by noxious chemical, mechanical, or thermal stimuli, in a subject, e.g., a mammal such as a human. In mammals, the initial detection of noxious chemical, mechanical, or thermal stimuli, a process referred to as “nociception”, occurs predominantly at the peripheral terminals of specialized, small diameter sensory neurons. These sensory neurons transmit the information to the central nervous system, evoking a perception of pain or discomfort and initiating appropriate protective reflexes. The TWIK-9 molecules of the present invention may be present on these sensory neurons and, thus, may be involved in detecting these noxious chemical, mechanical, or thermal stimuli and transducing this information into membrane depolarization events. Thus, the TWIK-9 molecules by participating in pain signaling mechanisms, may modulate pain elicitation and act as targets for developing novel diagnostic targets and therapeutic agents to control pain. Examples of pain disorders include headache (e.g., tension headache or migraine), back pain, cancer pain, arthritis pain, or neurogenic pain.

[2253] Potassium channel disorders also include cellular proliferation, growth, differentiation, or migration disorders. Cellular proliferation, growth, differentiation, or migration disorders include those disorders that affect cell proliferation, growth, differentiation, or migration processes. As used herein, a “cellular proliferation, growth, differentiation, or migration process” is a process by which a cell increases in number, size or content, by which a cell develops a specialized set of characteristics which differ from that of other cells, or by which a cell moves closer to or further from a particular location or stimulus. The TWIK-9 molecules of the present invention are involved in signal transduction mechanisms, which are known to be involved in cellular growth, differentiation, and migration processes. Thus, the TWIK-9 molecules may modulate cellular growth, differentiation, or migration, and may play a role in disorders characterized by aberrantly regulated growth, differentiation, or migration. Such disorders include cancer, e.g., carcinoma, sarcoma, lymphoma or leukemia, examples of which include, but are not limited to, breast, endometrial, ovarian, uterine, hepatic, gastrointestinal, prostate, colorectal, and lung cancer, melanoma, neurofibromatosis, adenomatous polyposis of the colon, Wilms' tumor, nephroblastoma, teratoma, rhabdomyosarcoma; tumor invasion, angiogenesis and metastasis; skeletal dysplasia; neuronal deficiencies resulting from impaired neural induction and patterning; and hematopoietic and/or myeloproliferative disorders.

[2254] TWIK-9-associated or related disorders also include disorders affecting tissues in which TWIK-9 protein is expressed.

[2255] In addition, the TWIK-9 proteins can be used to screen for naturally occurring TWIK-9 ligands or substrates, to screen for drugs or compounds which modulate TWIK-9 activity, as well as to treat disorders characterized by insufficient or excessive production of TWIK-9 protein or production of TWIK-9 protein forms which have decreased, aberrant or unwanted activity compared to TWIK-9 wild type protein (e.g., potassium channel associated disorders).

[2256] Moreover, the anti-TWIK-9 antibodies of the invention can be used to detect and isolate TWIK-9 proteins, regulate the bioavailability of TWIK-9 proteins, and modulate TWIK-9 activity.

[2257] A. Screening Assays:

[2258] The invention provides a method (also referred to herein as a “screening assay”) for identifying modulators, i.e., candidate or test compounds or agents (e.g., peptides, peptidomimetics, small molecules or other drugs) which bind to TWIK-9 proteins, have a stimulatory or inhibitory effect on, for example, TWIK-9 expression or TWIK-9 activity, or have a stimulatory or inhibitory effect on, for example, the expression or activity of a TWIK-9 ligand or substrate.

[2259] In one embodiment, the invention provides assays for screening candidate or test compounds which are ligands or substrates of a TWIK-9 protein or polypeptide or biologically active portion thereof. In another embodiment, the invention provides assays for screening candidate or test compounds which bind to or modulate the activity of a TWIK-9 protein or polypeptide or biologically active portion thereof. The test compounds of the present invention can be obtained using any of the numerous approaches in combinatorial library methods known in the art, including: biological libraries; spatially addressable parallel solid phase or solution phase libraries; synthetic library methods requiring deconvolution; the ‘one-bead one-compound’ library method; and synthetic library methods using affinity chromatography selection. The biological library approach is limited to peptide libraries, while the other four approaches are applicable to peptide, non-peptide oligomer or small molecule libraries of compounds (Lam, K. S. (1997) Anticancer Drug Des. 12:45).

[2260] Examples of methods for the synthesis of molecular libraries can be found in the art, for example, in: DeWitt et al. (1993) Proc. Natl. Acad. Sci. U.S.A. 90:6909; Erb et al. (1994) Proc. Natl. Acad. Sci. USA 91:11422; Zuckermann et al. (1994). J. Med. Chem. 37:2678; Cho et al. (1993) Science 261:1303; Carrell et al. (1994) Angew. Chem. Int. Ed. Engl. 33:2059; Carell et al. (1994) Angew. Chem. Int. Ed. Engl. 33:2061; and Gallop et al. (1994) J. Med. Chem. 37:1233.

[2261] Libraries of compounds may be presented in solution (e.g., Houghten (1992) Biotechniques 13:412-421), or on beads (Lam (1991) Nature 354:82-84), chips (Fodor (1993) Nature 364:555-556), bacteria (Ladner U.S. Pat. No. 5,223,409), spores (Ladner U.S. Pat. No. '409), plasmids (Cull et al. (1992) Proc Natl Acad Sci USA 89:1865-1869) or on phage (Scott and Smith (1990) Science 249:386-390); (Devlin (1990) Science 249:404-406); (Cwirla et al. (1990) Proc. Natl. Acad. Sci. USA 87:6378-6382); (Felici (1991) J. Mol. Biol. 222:301-310); (Ladner supra.).

[2262] In one embodiment, an assay is a cell-based assay in which a cell which expresses a TWIK-9 protein or biologically active portion thereof is contacted with a test compound and the ability of the test compound to modulate TWIK-9 activity is determined. Determining the ability of the test compound to modulate TWIK-9 activity can be accomplished by monitoring, for example, potassium current, neurotransmitter release and/or membrane excitability in a cell which expresses TWIK-9. The cell, for example, can be of mammalian origin, e.g., a neuronal cell.

[2263] The ability of the test compound to modulate TWIK-9 binding to a ligand or substrate, or to bind to TWIK-9 can also be determined. Determining the ability of the test compound to modulate TWIK-9 binding to a ligand or substrate can be accomplished, for example, by coupling the TWIK-9 ligand or substrate with a radioisotope or enzymatic label such that binding of the TWIK-9 ligand or substrate to TWIK-9 can be determined by detecting the labeled TWIK-9 ligand or substrate in a complex. Alternatively, TWIK-9 could be coupled with a radioisotope or enzymatic label to monitor the ability of a test compound to modulate TWIK-9 binding to a TWIK-9 ligand or substrate in a complex. Determining the ability of the test compound to bind TWIK-9 can be accomplished, for example, by coupling the compound with a radioisotope or enzymatic label such that binding of the compound to TWIK-9 can be determined by detecting the labeled compound in a complex. For example, compounds (e.g., TWIK-9 ligands or substrates) can be labeled with ¹²⁵I, ³⁵S, ¹⁴C, or ³H, either directly or indirectly, and the radioisotope detected by direct counting of radioemission or by scintillation counting. Alternatively, compounds can be enzymatically labeled with, for example, horseradish peroxidase, alkaline phosphatase, or luciferase, and the enzymatic label detected by determination of conversion of an appropriate substrate to product.

[2264] It is also within the scope of this invention to determine the ability of a compound (e.g., a TWIK-9 ligand or substrate) to interact with TWIK-9 without the labeling of any of the interactants. For example, a microphysiometer can be used to detect the interaction of a compound with TWIK-9 without the labeling of either the compound or the TWIK-9. McConnell, H. M. et al. (1992) Science 257:1906-1912. As used herein, a “microphysiometer” (e.g., Cytosensor) is an analytical instrument that measures the rate at which a cell acidifies its environment using a light-addressable potentiometric sensor (LAPS). Changes in this acidification rate can be used as an indicator of the interaction between a compound and TWIK-9.

[2265] In another embodiment, an assay is a cell-based assay comprising contacting a cell expressing a TWIK-9 target molecule (e.g., a TWIK-9 substrate) with a test compound and determining the ability of the test compound to modulate (e.g. stimulate or inhibit) the activity of the TWIK-9 target molecule. Determining the ability of the test compound to modulate the activity of a TWIK-9 target molecule can be accomplished, for example, by determining the ability of the TWIK-9 protein to bind to or interact with the TWIK-9 target molecule.

[2266] Determining the ability of the TWIK-9 protein or a biologically active fragment thereof, to bind to or interact with a TWIK-9 target molecule can be accomplished by one of the methods described above for determining direct binding. In a preferred embodiment, determining the ability of the TWIK-9 protein to bind to or interact with a TWIK-9 target molecule can be accomplished by determining the activity of the target molecule. For example, the activity of the target molecule can be determined by detecting induction of a cellular response (e.g., changes in intracellular K⁺ levels), detecting catalytic/enzymatic activity of the target molecule upon an appropriate substrate, detecting the induction of a reporter gene (comprising a target-responsive regulatory element operatively linked to a nucleic acid encoding a detectable marker, e.g., luciferase), or detecting a target-regulated cellular response.

[2267] In yet another embodiment, an assay of the present invention is a cell-free assay in which a TWIK-9 protein or biologically active portion thereof is contacted with a test compound and the ability of the test compound to bind to the TWIK-9 protein or biologically active portion thereof is determined. Preferred biologically active portions of the TWIK-9 proteins to be used in assays of the present invention include fragments which participate in interactions with non-TWIK-9 molecules, e.g., fragments with high surface probability scores (see, for example, FIG. 39). Binding of the test compound to the TWIK-9 protein can be determined either directly or indirectly as described above. In a preferred embodiment, the assay includes contacting the TWIK-9 protein or biologically active portion thereof with a known compound which binds TWIK-9 to form an assay mixture, contacting the assay mixture with a test compound, and determining the ability of the test compound to interact with a TWIK-9 protein, wherein determining the ability of the test compound to interact with a TWIK-9 protein comprises determining the ability of the test compound to preferentially bind to TWIK-9 or biologically active portion thereof as compared to the known compound.

[2268] In another embodiment, the assay is a cell-free assay in which a TWIK-9 protein or biologically active portion thereof is contacted with a test compound and the ability of the test compound to modulate (e.g., stimulate or inhibit) the activity of the TWIK-9 protein or biologically active portion thereof is determined. Determining the ability of the test compound to modulate the activity of a TWIK-9 protein can be accomplished, for example, by determining the ability of the TWIK-9 protein to bind to a TWIK-9 target molecule by one of the methods described above for determining direct binding. Determining the ability of the TWIK-9 protein to bind to a TWIK-9 target molecule can also be accomplished using a technology such as real-time Biomolecular Interaction Analysis (BIA). Sjolander, S. and Urbaniczky, C. (1991) Anal. Chem. 63:2338-2345 and Szabo et al. (1995) Curr. Opin. Struct. Biol 5:699-705. As used herein, “BIA” is a technology for studying biospecific interactions in real time, without labeling any of the interactants (e.g., BIAcore). Changes in the optical phenomenon of surface plasmon resonance (SPR) can be used as an indication of real-time reactions between biological molecules.

[2269] In an alternative embodiment, determining the ability of the test compound to modulate the activity of a TWIK-9 protein can be accomplished by determining the ability of the TWIK-9 protein to further modulate the activity of a downstream effector of a TWIK-9 target molecule. For example, the activity of the effector molecule on an appropriate target can be determined or the binding of the effector to an appropriate target can be determined as previously described.

[2270] In yet another embodiment, the cell-free assay involves contacting a TWIK-9 protein or biologically active portion thereof with a known compound which binds the TWIK-9 protein to form an assay mixture, contacting the assay mixture with a test compound, and determining the ability of the test compound to interact with the TWIK-9 protein, wherein determining the ability of the test compound to interact with the TWIK-9 protein comprises determining the ability of the TWIK-9 protein to preferentially bind to or modulate the activity of a TWIK-9 target molecule.

[2271] The cell-free assays of the present invention are amenable to use of both soluble and/or membrane-bound forms of isolated proteins (e.g., TWIK-9 proteins or biologically active portions thereof). In the case of cell-free assays in which a membrane-bound form of an isolated protein is used it may be desirable to utilize a solubilizing agent such that the membrane-bound form of the isolated protein is maintained in solution. Examples of such solubilizing agents include non-ionic detergents such as n-octylglucoside, n-dodecylglucoside, n-dodecylmaltoside, octanoyl-N-methylglucamide, decanoyl-N-methylglucamide, Triton® X-100, Triton® X-114, Thesit®, Isotridecypoly(ethylene glycol ether)ₙ, 3-[(3-cholamidopropyl)dimethylamminio]-1-propane sulfonate (CHAPS), 3-[(3-cholamidopropyl)dimethylamminio]-2-hydroxy-1-propane sulfonate (CHAPSO), or N-dodecyl=N,N-dimethyl-3-ammonio-1-propane sulfonate.

[2272] In more than one embodiment of the above assay methods of the present invention, it may be desirable to immobilize either TWIK-9 or its target molecule to facilitate separation of complexed from uncomplexed forms of one or both of the proteins, as well as to accommodate automation of the assay. Binding of a test compound to a TWIK-9 protein, or interaction of a TWIK-9 protein with a substrate or target molecule in the presence and absence of a candidate compound, can be accomplished in any vessel suitable for containing the reactants. Examples of such vessels include microtiter plates, test tubes, and micro-centrifuge tubes. In one embodiment, a fusion protein can be provided which adds a domain that allows one or both of the proteins to be bound to a matrix. For example, glutathione-S-transferase/TWIK-9 fusion proteins or glutathione-S-transferase/target fusion proteins can be adsorbed onto glutathione sepharose beads (Sigma Chemical, St. Louis, Mo.) or glutathione derivatized micrometer plates, which are then combined with the test compound or the test compound and either the non-adsorbed target protein or TWIK-9 protein, and the mixture incubated under conditions conducive to complex formation (e.g., at physiological conditions for salt and pH). Following incubation, the beads or microtiter plate wells are washed to remove any unbound components, the matrix immobilized in the case of beads, complex determined either directly or indirectly, for example, as described above. Alternatively, the complexes can be dissociated from the matrix, and the level of TWIK-9 binding or activity determined using standard techniques.

[2273] Other techniques for immobilizing proteins on matrices can also be used in the screening assays of the invention. For example, either a TWIK-9 protein or a TWIK-9 substrate or target molecule can be immobilized utilizing conjugation of biotin and streptavidin. Biotinylated TWIK-9 protein, substrates, or target molecules can be prepared from biotin-NHS (N-hydroxy-succinimide) using techniques known in the art (e.g., biotinylation kit, Pierce Chemicals, Rockford, Ill.), and immobilized in the wells of streptavidin-coated 96 well plates (Pierce Chemical). Alternatively, antibodies reactive with TWIK-9 protein or target molecules but which do not interfere with binding of the TWIK-9 protein to its target molecule can be derivatized to the wells of the plate, and unbound target or TWIK-9 protein trapped in the wells by antibody conjugation. Methods for detecting such complexes, in addition to those described above for the GST-immobilized complexes, include immunodetection of complexes using antibodies reactive with the TWIK-9 protein or target molecule, as well as enzyme-linked assays which rely on detecting an enzymatic activity associated with the TWIK-9 protein or target molecule.

[2274] In another embodiment, modulators of TWIK-9 expression are identified in a method wherein a cell is contacted with a candidate compound and the expression of TWIK-9 mRNA or protein in the cell is determined. The level of expression of TWIK-9 mRNA or protein in the presence of the candidate compound is compared to the level of expression of TWIK-9 mRNA or protein in the absence of the candidate compound. The candidate compound can then be identified as a modulator of TWIK-9 expression based on this comparison. For example, when expression of TWIK-9 mRNA or protein is greater (statistically significantly greater) in the presence of the candidate compound than in its absence, the candidate compound is identified as a stimulator of TWIK-9 mRNA or protein expression. Alternatively, when expression of TWIK-9 mRNA or protein is less (statistically significantly less) in the presence of the candidate compound than in its absence, the candidate compound is identified as an inhibitor of TWIK-9 mRNA or protein expression. The level of TWIK-9 mRNA or protein expression in the cells can be determined by methods described herein for detecting TWIK-9 mRNA or protein.

[2275] In yet another aspect of the invention, the TWIK-9 proteins can be used as “bait proteins” in a two-hybrid assay or three-hybrid assay (see, e.g., U.S. Pat. No. 5,283,317; Zervos et al. (1993) Cell 72:223-232; Madura et al. (1993) J. Biol. Chem. 268:12046-12054; Bartel et al. (1993) Biotechniques 14:920-924; Iwabuchi et al. (1993) Oncogene 8:1693-1696; and Brent WO94/10300) to identify other proteins which bind to or interact with TWIK-9 (“TWIK-9-binding proteins” or “TWIK-9-bp”) and are involved in TWIK-9 activity. Such TWIK-9-binding proteins are also likely to be involved in the propagation of signals by the TWIK-9 proteins or TWIK-9 targets as, for example, downstream elements of a TWIK-9-mediated signaling pathway. Alternatively, such TWIK-9-binding proteins may be TWIK-9 inhibitors.

[2276] The two-hybrid system is based on the modular nature of most transcription factors, which consist of separable DNA-binding and activation domains. Briefly, the assay utilizes two different DNA constructs. In one construct, the gene that codes for a TWIK-9 protein is fused to a gene encoding the DNA binding domain of a known transcription factor (e.g., GAL-4). In the other construct, a DNA sequence, from a library of DNA sequences, that encodes an unidentified protein (“prey” or “sample”) is fused to a gene that codes for the activation domain of the known transcription factor. If the “bait” and the “prey” proteins are able to interact, in vivo, forming a TWIK-9-dependent complex, the DNA-binding and activation domains of the transcription factor are brought into close proximity. This proximity allows transcription of a reporter gene (e.g., LacZ) which is operably linked to a transcriptional regulatory site responsive to the transcription factor. Expression of the reporter gene can be detected and cell colonies containing the functional transcription factor can be isolated and used to obtain the cloned gene which encodes the protein which interacts with the TWIK-9 protein.

[2277] In another aspect, the invention pertains to a combination of two or more of the assays described herein. For example, a modulating agent can be identified using a cell-based or a cell-free assay, and the ability of the agent to modulate the activity of a TWIK-9 protein can be confirmed in vivo, e.g., in an animal such as an animal model for a neurodegenerative disorder or for pain.

[2278] This invention further pertains to novel agents identified by the above-described screening assays. Accordingly, it is within the scope of this invention to further use an agent identified as described herein in an appropriate animal model. For example, an agent identified as described herein (e.g., a TWIK-9 modulating agent, an antisense TWIK-9 nucleic acid molecule, a TWIK-9-specific antibody, or a TWIK-9 binding partner) can be used in an animal model to determine the efficacy, toxicity, or side effects of treatment with such an agent. Alternatively, an agent identified as described herein can be used in an animal model to determine the mechanism of action of such an agent. Furthermore, this invention pertains to uses of novel agents identified by the above-described screening assays for treatments as described herein.

[2279] B. Detection Assays

[2280] Portions or fragments of the cDNA sequences identified herein (and the corresponding complete gene sequences) can be used in numerous ways as polynucleotide reagents. For example, these sequences can be used to: (i) map their respective genes on a chromosome; and, thus, locate gene regions associated with genetic disease; (ii) identify an individual from a minute biological sample (tissue typing); and (iii) aid in forensic identification of a biological sample. These applications are described in the subsections below.

[2281] 1. Chromosome Mapping

[2282] Once the sequence (or a portion of the sequence) of a gene has been isolated, this sequence can be used to map the location of the gene on a chromosome. This process is called chromosome mapping. Accordingly, portions or fragments of the TWIK-9 nucleotide sequences, described herein, can be used to map the location of the TWIK-9 genes on a chromosome. The mapping of the TWIK-9 sequences to chromosomes is an important first step in correlating these sequences with genes associated with disease.

[2283] Briefly, TWIK-9 genes can be mapped to chromosomes by preparing PCR primers (preferably 15-25 bp in length) from the TWIK-9 nucleotide sequences. Computer analysis of the TWIK-9 sequences can be used to predict primers that do not span more than one exon in the genomic DNA, thus complicating the amplification process. These primers can then be used for PCR screening of somatic cell hybrids containing individual human chromosomes. Only those hybrids containing the human gene corresponding to the TWIK-9 sequences will yield an amplified fragment.

[2284] Somatic cell hybrids are prepared by fusing somatic cells from different mammals (e.g., human and mouse cells). As hybrids of human and mouse cells grow and divide, they gradually lose human chromosomes in random order, but retain the mouse chromosomes. By using media in which mouse cells cannot grow, because they lack a particular enzyme, but human cells can, the one human chromosome that contains the gene encoding the needed enzyme, will be retained. By using various media, panels of hybrid cell lines can be established. Each cell line in a panel contains either a single human chromosome or a small number of human chromosomes, and a full set of mouse chromosomes, allowing easy mapping of individual genes to specific human chromosomes. (D'Eustachio P. et al. (1983) Science 220:919-924). Somatic cell hybrids containing only fragments of human chromosomes can also be produced by using human chromosomes with translocations and deletions.

[2285] PCR mapping of somatic cell hybrids is a rapid procedure for assigning a particular sequence to a particular chromosome. Three or more sequences can be assigned per day using a single thermal cycler. Using the TWIK-9 nucleotide sequences to design oligonucleotide primers, sublocalization can be achieved with panels of fragments from specific chromosomes. Other mapping strategies which can similarly be used to map a TWIK-9 sequence to its chromosome include in situ hybridization (described in Fan, Y. et al. (1990) Proc. Natl. Acad. Sci. USA, 87:6223-27), pre-screening with labeled flow-sorted chromosomes, and pre-selection by hybridization to chromosome-specific cDNA libraries.

[2286] Fluorescence in situ hybridization (FISH) of a DNA sequence to a metaphase chromosomal spread can further be used to provide a precise chromosomal location in one step. Chromosome spreads can be made using cells whose division has been blocked in metaphase by a chemical such as colcemid that disrupts the mitotic spindle. The chromosomes can be treated briefly with trypsin, and then stained with Giemsa. A pattern of light and dark bands develops on each chromosome, so that the chromosomes can be identified individually. The FISH technique can be used with a DNA sequence as short as 500 or 600 bases. However, clones larger than 1,000 bases have a higher likelihood of binding to a unique chromosomal location with sufficient signal intensity for simple detection. Preferably 1,000 bases, and more preferably 2,000 bases will suffice to get good results at a reasonable amount of time. For a review of this technique, see Verma et al., Human Chromosomes: A Manual of Basic Techniques (Pergamon Press, New York 1988).

[2287] Reagents for chromosome mapping can be used individually to mark a single chromosome or a single site on that chromosome, or panels of reagents can be used for marking multiple sites and/or multiple chromosomes. Reagents corresponding to noncoding regions of the genes actually are preferred for mapping purposes. Coding sequences are more likely to be conserved within gene families, thus increasing the chance of cross hybridizations during chromosomal mapping.

[2288] Once a sequence has been mapped to a precise chromosomal location, the physical position of the sequence on the chromosome can be correlated with genetic map data. (Such data are found, for example, in McKusick, V., Mendelian Inheritance in Man, available on-line through Johns Hopkins University Welch Medical Library). The relationship between a gene and a disease, mapped to the same chromosomal region, can then be identified through linkage analysis (co-inheritance of physically adjacent genes), described in, for example, Egeland, J. et al. (1987) Nature, 325:783-787.

[2289] Moreover, differences in the DNA sequences between individuals affected and unaffected with a disease associated with the TWIK-9 gene, can be determined. If a mutation is observed in some or all of the affected individuals but not in any unaffected individuals, then the mutation is likely to be the causative agent of the particular disease. Comparison of affected and unaffected individuals generally involves first looking for structural alterations in the chromosomes, such as deletions or translocations that are visible from chromosome spreads or detectable using PCR based on that DNA sequence. Ultimately, complete sequencing of genes from several individuals can be performed to confirm the presence of a mutation and to distinguish mutations from polymorphisms.

[2290] 2. Tissue Typing

[2291] The TWIK-9 sequences of the present invention can also be used to identify individuals from minute biological samples. The United States military, for example, is considering the use of restriction fragment length polymorphism (RFLP) for identification of its personnel. In this technique, an individual's genomic DNA is digested with one or more restriction enzymes, and probed on a Southern blot to yield unique bands for identification. This method does not suffer from the current limitations of “Dog Tags” which can be lost, switched, or stolen, making positive identification difficult. The sequences of the present invention are useful as additional DNA markers for RFLP (described in U.S. Pat. No. 5,272,057).

[2292] Furthermore, the sequences of the present invention can be used to provide an alternative technique which determines the actual base-by-base DNA sequence of selected portions of an individual's genome. Thus, the TWIK-9 nucleotide sequences described herein can be used to prepare two PCR primers from the 5′ and 3′ ends of the sequences. These primers can then be used to amplify an individual's DNA and subsequently sequence it.

[2293] Panels of corresponding DNA sequences from individuals, prepared in this manner, can provide unique individual identifications, as each individual will have a unique set of such DNA sequences due to allelic differences. The sequences of the present invention can be used to obtain such identification sequences from individuals and from tissue. The TWIK-9 nucleotide sequences of the invention uniquely represent portions of the human genome. Allelic variation occurs to some degree in the coding regions of these sequences, and to a greater degree in the noncoding regions. It is estimated that allelic variation between individual humans occurs with a frequency of about once per each 500 bases. Each of the sequences described herein can, to some degree, be used as a standard against which DNA from an individual can be compared for identification purposes. Because greater numbers of polymorphisms occur in the noncoding regions, fewer sequences are necessary to differentiate individuals. The noncoding sequences of SEQ ID NO:40 can comfortably provide positive individual identification with a panel of perhaps 10 to 1,000 primers which each yield a noncoding amplified sequence of 100 bases. If predicted coding sequences, such as those in SEQ ID NO:42 are used, a more appropriate number of primers for positive individual identification would be 500-2,000.

[2294] If a panel of reagents from TWIK-9 nucleotide sequences described herein is used to generate a unique identification database for an individual, those same reagents can later be used to identify tissue from that individual. Using the unique identification database, positive identification of the individual, living or dead, can be made from extremely small tissue samples.

[2295] 3. Use of Partial TWIK-9 Sequences in Forensic Biology

[2296] DNA-based identification techniques can also be used in forensic biology. Forensic biology is a scientific field employing genetic typing of biological evidence found at a crime scene as a means for positively identifying, for example, a perpetrator of a crime. To make such an identification, PCR technology can be used to amplify DNA sequences taken from very small biological samples such as tissues, e.g., hair or skin, or body fluids, e.g., blood, saliva, or semen found at a crime scene. The amplified sequence can then be compared to a standard, thereby allowing identification of the origin of the biological sample.

[2297] The sequences of the present invention can be used to provide polynucleotide reagents, e.g., PCR primers, targeted to specific loci in the human genome, which can enhance the reliability of DNA-based forensic identifications by, for example, providing another “identification marker” (i.e. another DNA sequence that is unique to a particular individual). As mentioned above, actual base sequence information can be used for identification as an accurate alternative to patterns formed by restriction enzyme generated fragments. Sequences targeted to noncoding regions of SEQ ID NO:40 are particularly appropriate for this use as greater numbers of polymorphisms occur in the noncoding regions, making it easier to differentiate individuals using this technique. Examples of polynucleotide reagents include the TWIK-9 nucleotide sequences or portions thereof, e.g., fragments derived from the noncoding regions of SEQ ID NO:40 having a length of at least 20 bases, preferably at least 30 bases.

[2298] The TWIK-9 nucleotide sequences described herein can further be used to provide polynucleotide reagents, e.g., labeled or labelable probes which can be used in, for example, an in situ hybridization technique, to identify a specific tissue, e.g., a tissue which expresses TWIK-9, e.g., brain tissue. This can be very useful in cases where a forensic pathologist is presented with a tissue of unknown origin. Panels of such TWIK-9 probes can be used to identify tissue by species and/or by organ type.

[2299] In a similar fashion, these reagents, e.g., TWIK-9 primers or probes can be used to screen tissue culture for contamination (i.e. screen for the presence of a mixture of different types of cells in a culture).

[2300] C. Predictive Medicine:

[2301] The present invention also pertains to the field of predictive medicine in which diagnostic assays, prognostic assays, and monitoring clinical trials are used for prognostic (predictive) purposes to thereby treat an individual prophylactically. Accordingly, one aspect of the present invention relates to diagnostic assays for determining TWIK-9 protein and/or nucleic acid expression as well as TWIK-9 activity, in the context of a biological sample (e.g., blood, serum, cells, or tissue) to thereby determine whether an individual is afflicted with a disease or disorder, or is at risk of developing a disorder, associated with aberrant or unwanted TWIK-9 expression or activity. The invention also provides for prognostic (or predictive) assays for determining whether an individual is at risk of developing a disorder associated with TWIK-9 protein, nucleic acid expression, or activity. For example, mutations in a TWIK-9 gene can be assayed in a biological sample. Such assays can be used for prognostic or predictive purpose to thereby prophylactically treat an individual prior to the onset of a disorder characterized by or associated with TWIK-9 protein, nucleic acid expression or activity.

[2302] Another aspect of the invention pertains to monitoring the influence of agents (e.g., drugs, compounds) on the expression or activity of TWIK-9 in clinical trials.

[2303] These and other agents are described in further detail in the following sections.

[2304] 1. Diagnostic Assays

[2305] An exemplary method for detecting the presence or absence of TWIK-9 protein, polypeptide or nucleic acid in a biological sample involves obtaining a biological sample from a test subject and contacting the biological sample with a compound or an agent capable of detecting TWIK-9 protein, polypeptide or nucleic acid (e.g., mRNA, genomic DNA) that encodes TWIK-9 protein such that the presence of TWIK-9 protein or nucleic acid is detected in the biological sample. In another aspect, the present invention provides a method for detecting the presence of TWIK-9 activity in a biological sample by contacting the biological sample with an agent capable of detecting an indicator of TWIK-9 activity such that the presence of TWIK-9 activity is detected in the biological sample. A preferred agent for detecting TWIK-9 mRNA or genomic DNA is a labeled nucleic acid probe capable of hybridizing to TWIK-9 mRNA or genomic DNA. The nucleic acid probe can be, for example, a full-length TWIK-9 nucleic acid, such as the nucleic acid of SEQ ID NO:40 or 42, or the DNA insert of the plasmid deposited with ATCC as Accession Number ______, or a portion thereof, such as an oligonucleotide of at least 15, 30, 50, 100, 250 or 500 nucleotides in length and sufficient to specifically hybridize under stringent conditions to TWIK-9 mRNA or genomic DNA. Other suitable probes for use in the diagnostic assays of the invention are described herein.

[2306] A preferred agent for detecting TWIK-9 protein is an antibody capable of binding to TWIK-9 protein, preferably an antibody with a detectable label. Antibodies can be polyclonal, or more preferably, monoclonal. An intact antibody, or a fragment thereof (e.g., Fab or F(ab′)₂) can be used. The term “labeled”, with regard to the probe or antibody, is intended to encompass direct labeling of the probe or antibody by coupling (i.e., physically linking) a detectable substance to the probe or antibody, as well as indirect labeling of the probe or antibody by reactivity with another reagent that is directly labeled. Examples of indirect labeling include detection of a primary antibody using a fluorescently labeled secondary antibody and end-labeling of a DNA probe with biotin such that it can be detected with fluorescently labeled streptavidin. The term “biological sample” is intended to include tissues, cells and biological fluids isolated from a subject, as well as tissues, cells and fluids present within a subject. That is, the detection method of the invention can be used to detect TWIK-9 mRNA, protein, or genomic DNA in a biological sample in vitro as well as in vivo. For example, in vitro techniques for detection of TWIK-9 mRNA include Northern hybridizations and in situ hybridizations. In vitro techniques for detection of TWIK-9 protein include enzyme linked immunosorbent assays (ELISAs), Western blots, immunoprecipitations and immunofluorescence. In vitro techniques for detection of TWIK-9 genomic DNA include Southern hybridizations. Furthermore, in vivo techniques for detection of a TWIK-9 protein include introducing into a subject a labeled anti-TWIK-9 antibody. For example, the antibody can be labeled with a radioactive marker whose presence and location in a subject can be detected by standard imaging techniques.

[2307] The present invention also provides diagnostic assays for identifying the presence or absence of a genetic alteration characterized by at least one of (i) aberrant modification or mutation of a gene encoding a TWIK-9 protein; (ii) aberrant expression of a gene encoding a TWIK-9 protein; (iii) mis-regulation of the gene; and (iv) aberrant post-translational modification of a TWIK-9 protein, wherein a wild-type form of the gene encodes a protein with a TWIK-9 activity. “Misexpression or aberrant expression”, as used herein, refers to a non-wild type pattern of gene expression, at the RNA or protein level. It includes, but is not limited to, expression at non-wild type levels (e.g., over or under expression); a pattern of expression that differs from wild type in terms of the time or stage at which the gene is expressed (e.g., increased or decreased expression (as compared with wild type) at a predetermined developmental period or stage); a pattern of expression that differs from wild type in terms of decreased expression (as compared with wild type) in a predetermined cell type or tissue type; a pattern of expression that differs from wild type in terms of the splicing size, amino acid sequence, post-transitional modification, or biological activity of the expressed polypeptide; a pattern of expression that differs from wild type in terms of the effect of an environmental stimulus or extracellular stimulus on expression of the gene (e.g., a pattern of increased or decreased expression (as compared with wild type) in the presence of an increase or decrease in the strength of the stimulus).

[2308] In one embodiment, the biological sample contains protein molecules from the test subject. Alternatively, the biological sample can contain mRNA molecules from the test subject or genomic DNA molecules from the test subject. A preferred biological sample is a serum sample isolated by conventional means from a subject.

[2309] In another embodiment, the methods further involve obtaining a control biological sample from a control subject, contacting the control sample with a compound or agent capable of detecting TWIK-9 protein, mRNA, or genomic DNA, such that the presence of TWIK-9 protein, mRNA or genomic DNA is detected in the biological sample, and comparing the presence of TWIK-9 protein, mRNA or genomic DNA in the control sample with the presence of TWIK-9 protein, mRNA or genomic DNA in the test sample.

[2310] The invention also encompasses kits for detecting the presence of TWIK-9 in a biological sample. For example, the kit can comprise a labeled compound or agent capable of detecting TWIK-9 protein or mRNA in a biological sample; means for determining the amount of TWIK-9 in the sample; and means for comparing the amount of TWIK-9 in the sample with a standard. The compound or agent can be packaged in a suitable container. The kit can further comprise instructions for using the kit to detect TWIK-9 protein or nucleic acid.

[2311] 2. Prognostic Assays

[2312] The diagnostic methods described herein can furthermore be utilized to identify subjects having or at risk of developing a disease or disorder associated with aberrant or unwanted TWIK-9 expression or activity. As used herein, the term “aberrant” includes a TWIK-9 expression or activity which deviates from the wild type TWIK-9 expression or activity. Aberrant expression or activity includes increased or decreased expression or activity, as well as expression or activity which does not follow the wild type developmental pattern of expression or the subcellular pattern of expression. For example, aberrant TWIK-9 expression or activity is intended to include the cases in which a mutation in the TWIK-9 gene causes the TWIK-9 gene to be under-expressed or over-expressed and situations in which such mutations result in a non-functional TWIK-9 protein or a protein which does not function in a wild-type fashion, e.g., a protein which does not interact with a TWIK-9 ligand or substrate, e.g., a non-potassium channel subunit, or one which interacts with a non-TWIK-9 ligand or substrate. As used herein, the term “unwanted” includes an unwanted phenomenon involved in a biological response such as deregulated cell proliferation or seizure susceptibility. For example, the term unwanted includes a TWIK-9 expression or activity which is undesirable in a subject.

[2313] The assays described herein, such as the preceding diagnostic assays or the following assays, can be utilized to identify a subject having or at risk of developing a disorder associated with a misregulation in TWIK-9 protein activity or nucleic acid expression, such as a CNS disorder (e.g., a cognitive or neurodegenerative disorder, or a pain disorder), a muscular disorder, a cardiovascular disorder, or a cellular proliferation, growth, differentiation or migration disorder. Alternatively, the prognostic assays can be utilized to identify a subject having or at risk for developing a disorder associated with a misregulation in TWIK-9 protein activity or nucleic acid expression, such as a CNS disorder (e.g., a cognitive or neurodegenerative disorder, or a pain disorder), a muscular disorder, a cardiovascular disorder, or a cellular proliferation, growth, differentiation or migration disorder. Thus, the present invention provides a method for identifying a disease or disorder associated with aberrant or unwanted TWIK-9 expression or activity in which a test sample is obtained from a subject and TWIK-9 protein or nucleic acid (e.g., mRNA or genomic DNA) is detected, wherein the presence of TWIK-9 protein or nucleic acid is diagnostic for a subject having or at risk of developing a disease or disorder associated with aberrant or unwanted TWIK-9 expression or activity. As used herein, a “test sample” refers to a biological sample obtained from a subject of interest. For example, a test sample can be a biological fluid (e.g., cerebrospinal fluid or serum), cell sample, or tissue.

[2314] Furthermore, the prognostic assays described herein can be used to determine whether a subject can be administered an agent (e.g., an agonist, antagonist, peptidomimetic, protein, peptide, nucleic acid, small molecule, or other drug candidate) to treat a disease or disorder associated with aberrant or unwanted TWIK-9 expression or activity. For example, such methods can be used to determine whether a subject can be effectively treated with an agent for a CNS disorder (e.g., a cognitive or neurodegenerative disorder, or a pain disorder), a muscular disorder, a cardiovascular disorder, or a cellular proliferation, growth, differentiation or migration disorder. Thus, the present invention provides methods for determining whether a subject can be effectively treated with an agent for a disorder associated with aberrant or unwanted TWIK-9 expression or activity in which a test sample is obtained and TWIK-9 protein or nucleic acid expression or activity is detected (e.g., wherein the abundance of TWIK-9 protein or nucleic acid expression or activity is diagnostic for a subject that can be administered the agent to treat a disorder associated with aberrant or unwanted TWIK-9 expression or activity).

[2315] The methods of the invention can also be used to detect genetic alterations in a TWIK-9 gene, thereby determining if a subject with the altered gene is at risk for a disorder characterized by misregulation in TWIK-9 protein activity or nucleic acid expression, such as a CNS disorder (e.g., a cognitive or neurodegenerative disorder, or a pain disorder), a muscular disorder, a cardiovascular disorder, or a cellular proliferation, growth, differentiation or migration disorder. In preferred embodiments, the methods include detecting, in a sample of cells from the subject, the presence or absence of a genetic alteration characterized by at least one of an alteration affecting the integrity of a gene encoding a TWIK-9-protein, or the mis-expression of the TWIK-9 gene. For example, such genetic alterations can be detected by ascertaining the existence of at least one of 1) a deletion of one or more nucleotides from a TWIK-9 gene; 2) an addition of one or more nucleotides to a TWIK-9 gene; 3) a substitution of one or more nucleotides of a TWIK-9 gene, 4) a chromosomal rearrangement of a TWIK-9 gene; 5) an alteration in the level of a messenger RNA transcript of a TWIK-9 gene, 6) aberrant modification of a TWIK-9 gene, such as of the methylation pattern of the genomic DNA, 7) the presence of a non-wild type splicing pattern of a messenger RNA transcript of a TWIK-9 gene, 8) a non-wild type level of a TWIK-9-protein, 9) allelic loss of a TWIK-9 gene, and 10) inappropriate post-translational modification of a TWIK-9-protein. As described herein, there are a large number of assays known in the art which can be used for detecting alterations in a TWIK-9 gene. A preferred biological sample is a tissue or serum sample isolated by conventional means from a subject.

[2316] In certain embodiments, detection of the alteration involves the use of a probe/primer in a polymerase chain reaction (PCR) (see, e.g., U.S. Pat. Nos. 4,683,195 and 4,683,202), such as anchor PCR or RACE PCR, or, alternatively, in a ligation chain reaction (LCR) (see, e.g., Landegran et al. (1988) Science 241:1077-1080; and Nakazawa et al. (1994) Proc. Natl. Acad. Sci. USA 91:360-364), the latter of which can be particularly useful for detecting point mutations in the TWIK-9-gene (see Abravaya et al. (1995) Nucleic Acids Res. 23:675-682). This method can include the steps of collecting a sample of cells from a subject, isolating nucleic acid (e.g., genomic, mRNA or both) from the cells of the sample, contacting the nucleic acid sample with one or more primers which specifically hybridize to a TWIK-9 gene under conditions such that hybridization and amplification of the TWIK-9-gene (if present) occurs, and detecting the presence or absence of an amplification product, or detecting the size of the amplification product and comparing the length to a control sample. It is anticipated that PCR and/or LCR may be desirable to use as a preliminary amplification step in conjunction with any of the techniques used for detecting mutations described herein.

[2317] Alternative amplification methods include: self sustained sequence replication (Guatelli, J. C. et al. (1990) Proc. Natl. Acad. Sci. USA 87:1874-1878), transcriptional amplification system (Kwoh, D. Y. et al. (1989) Proc. Natl. Acad. Sci. USA 86:1173-1177), Q-Beta Replicase (Lizardi, P. M. et al. (1988) Bio-Technology 6:1197), or any other nucleic acid amplification method, followed by the detection of the amplified molecules using techniques well known to those of skill in the art. These detection schemes are especially useful for the detection of nucleic acid molecules if such molecules are present in very low numbers.

[2318] In an alternative embodiment, mutations in a TWIK-9 gene from a sample cell can be identified by alterations in restriction enzyme cleavage patterns. For example, sample and control DNA is isolated, amplified (optionally), digested with one or more restriction endonucleases, and fragment length sizes are determined by gel electrophoresis and compared. Differences in fragment length sizes between sample and control DNA indicates mutations in the sample DNA. Moreover, the use of sequence specific ribozymes (see, for example, U.S. Pat. No. 5,498,531) can be used to score for the presence of specific mutations by development or loss of a ribozyme cleavage site.

[2319] In other embodiments, genetic mutations in TWIK-9 can be identified by hybridizing a sample and control nucleic acids, e.g., DNA or RNA, to high density arrays containing hundreds or thousands of oligonucleotides probes (Cronin, M. T. et al. (1996) Human Mutation 7:244-255; Kozal, M. J. et al. (1996) Nature Medicine 2:753-759). For example, genetic mutations in TWIK-9 can be identified in two dimensional arrays containing light-generated DNA probes as described in Cronin, M. T. et al. (1996) supra. Briefly, a first hybridization array of probes can be used to scan through long stretches of DNA in a sample and control to identify base changes between the sequences by making linear arrays of sequential overlapping probes. This step allows the identification of point mutations. This step is followed by a second hybridization array that allows the characterization of specific mutations by using smaller, specialized probe arrays complementary to all variants or mutations detected. Each mutation array is composed of parallel probe sets, one complementary to the wild-type gene and the other complementary to the mutant gene.

[2320] In yet another embodiment, any of a variety of sequencing reactions known in the art can be used to directly sequence the TWIK-9 gene and detect mutations by comparing the sequence of the sample TWIK-9 with the corresponding wild-type (control) sequence. Examples of sequencing reactions include those based on techniques developed by Maxam and Gilbert ((1977) Proc. Natl. Acad. Sci. USA 74:560) or Sanger ((1977) Proc. Natl. Acad. Sci. USA 74:5463). It is also contemplated that any of a variety of automated sequencing procedures can be utilized when performing the diagnostic assays (Naeve, C. W. (1995) Biotechniques 19:448), including sequencing by mass spectrometry (see, e.g., PCT International Publication No. WO 94/16101; Cohen et al. (1996) Adv. Chromatogr. 36:127-162; and Griffin et al. (1993) Appl. Biochem. Biotechnol. 38:147-159).

[2321] Other methods for detecting mutations in the TWIK-9 gene include methods in which protection from cleavage agents is used to detect mismatched bases in RNA/RNA or RNA/DNA heteroduplexes (Myers et al. (1985) Science 230:1242). In general, the art technique of “mismatch cleavage” starts by providing heteroduplexes formed by hybridizing (labeled) RNA or DNA containing the wild-type TWIK-9 sequence with potentially mutant RNA or DNA obtained from a tissue sample. The double-stranded duplexes are treated with an agent which cleaves single-stranded regions of the duplex such as which will exist due to basepair mismatches between the control and sample strands. For instance, RNA/DNA duplexes can be treated with RNase and DNA/DNA hybrids treated with S1 nuclease to enzymatically digesting the mismatched regions. In other embodiments, either DNA/DNA or RNA/DNA duplexes can be treated with hydroxylamine or osmium tetroxide and with piperidine in order to digest mismatched regions. After digestion of the mismatched regions, the resulting material is then separated by size on denaturing polyacrylamide gels to determine the site of mutation. See, for example, Cotton et al. (1988) Proc. Natl Acad Sci USA 85:4397; Saleeba et al. (1992) Methods Enzymol. 217:286-295. In a preferred embodiment, the control DNA or RNA can be labeled for detection.

[2322] In still another embodiment, the mismatch cleavage reaction employs one or more proteins that recognize mismatched base pairs in double-stranded DNA (so called “DNA mismatch repair” enzymes) in defined systems for detecting and mapping point mutations in TWIK-9 cDNAs obtained from samples of cells. For example, the mutY enzyme of E. coli cleaves A at G/A mismatches and the thymidine DNA glycosylase from HeLa cells cleaves T at G/T mismatches (Hsu et al. (1994) Carcinogenesis 15:1657-1662). According to an exemplary embodiment, a probe based on a TWIK-9 sequence, e.g, a wild-type TWIK-9 sequence, is hybridized to a cDNA or other DNA product from a test cell(s). The duplex is treated with a DNA mismatch repair enzyme, and the cleavage products, if any, can be detected from electrophoresis protocols or the like. See, for example, U.S. Pat. No. 5,459,039.

[2323] In other embodiments, alterations in electrophoretic mobility will be used to identify mutations in TWIK-9 genes. For example, single strand conformation polymorphism (SSCP) may be used to detect differences in electrophoretic mobility between mutant and wild type nucleic acids (Orita et al. (1989) Proc Natl. Acad. Sci USA: 86:2766, see also Cotton (1993) Mutat. Res. 285:125-144; and Hayashi (1992) Genet. Anal. Tech. Appl. 9:73-79). Single-stranded DNA fragments of sample and control TWIK-9 nucleic acids will be denatured and allowed to renature. The secondary structure of single-stranded nucleic acids varies according to sequence, the resulting alteration in electrophoretic mobility enables the detection of even a single base change. The DNA fragments may be labeled or detected with labeled probes. The sensitivity of the assay may be enhanced by using RNA (rather than DNA), in which the secondary structure is more sensitive to a change in sequence. In a preferred embodiment, the subject method utilizes heteroduplex analysis to separate double stranded heteroduplex molecules on the basis of changes in electrophoretic mobility (Keen et al. (1991) Trends Genet. 7:5).

[2324] In yet another embodiment the movement of mutant or wild-type fragments in polyacrylamide gels containing a gradient of denaturant is assayed using denaturing gradient gel electrophoresis (DGGE) (Myers et al. (1985) Nature 313:495). When DGGE is used as the method of analysis, DNA will be modified to insure that it does not completely denature, for example by adding a GC clamp of approximately 40 bp of high-melting GC-rich DNA by PCR. In a further embodiment, a temperature gradient is used in place of a denaturing gradient to identify differences in the mobility of control and sample DNA (Rosenbaum and Reissner (1987) Biophys Chem 265:12753).

[2325] Examples of other techniques for detecting point mutations include, but are not limited to, selective oligonucleotide hybridization, selective amplification, or selective primer extension. For example, oligonucleotide primers may be prepared in which the known mutation is placed centrally and then hybridized to target DNA under conditions which permit hybridization only if a perfect match is found (Saiki et al. (1986) Nature 324:163); Saiki et al. (1989) Proc. Natl Acad. Sci USA 86:6230). Such allele specific oligonucleotides are hybridized to PCR amplified target DNA or a number of different mutations when the oligonucleotides are attached to the hybridizing membrane and hybridized with labeled target DNA.

[2326] Alternatively, allele specific amplification technology which depends on selective PCR amplification may be used in conjunction with the instant invention. Oligonucleotides used as primers for specific amplification may carry the mutation of interest in the center of the molecule (so that amplification depends on differential hybridization) (Gibbs et al. (1989) Nucleic Acids Res. 17:2437-2448) or at the extreme 3′ end of one primer where, under appropriate conditions, mismatch can prevent, or reduce polymerase extension (Prossner (1993) Tibtech 11:238). In addition it may be desirable to introduce a novel restriction site in the region of the mutation to create cleavage-based detection (Gasparini et al. (1992) Mol. Cell Probes 6:1). It is anticipated that in certain embodiments amplification may also be performed using Taq ligase for amplification (Barany (1991) Proc. Natl. Acad. Sci USA 88:189). In such cases, ligation will occur only if there is a perfect match at the 3′ end of the 5′ sequence making it possible to detect the presence of a known mutation at a specific site by looking for the presence or absence of amplification.

[2327] The methods described herein may be performed, for example, by utilizing pre-packaged diagnostic kits comprising at least one probe nucleic acid or antibody reagent described herein, which may be conveniently used, e.g., in clinical settings to diagnose patients exhibiting symptoms or family history of a disease or illness involving a TWIK-9 gene.

[2328] Furthermore, any cell type or tissue in which TWIK-9 is expressed may be utilized in the prognostic assays described herein.

[2329] 3. Monitoring of Effects During Clinical Trials

[2330] Monitoring the influence of agents (e.g., drugs) on the expression or activity of a TWIK-9 protein (e.g., the modulation of pain signaling mechanisms, neurotransmitter release, membrane excitability and/or cell growth, proliferation, or differentiation mechanisms) can be applied not only in basic drug screening, but also in clinical trials. For example, the effectiveness of an agent determined by a screening assay as described herein to increase TWIK-9 gene expression, protein levels, or upregulate TWIK-9 activity, can be monitored in clinical trials of subjects exhibiting decreased TWIK-9 gene expression, protein levels, or downregulated TWIK-9 activity. Alternatively, the effectiveness of an agent determined by a screening assay to decrease TWIK-9 gene expression, protein levels, or downregulate TWIK-9 activity, can be monitored in clinical trials of subjects exhibiting increased TWIK-9 gene expression, protein levels, or upregulated TWIK-9 activity. In such clinical trials, the expression or activity of a TWIK-9 gene, and preferably, other genes that have been implicated in, for example, a TWIK-9-associated disorder can be used as a “read out” or markers of the phenotype of a particular cell.

[2331] For example, and not by way of limitation, genes, including TWIK-9, that are modulated in cells by treatment with an agent (e.g., compound, drug or small molecule) which modulates TWIK-9 activity (e.g., identified in a screening assay as described herein) can be identified. Thus, to study the effect of agents on TWIK-9-associated disorders (e.g., disorders characterized by deregulated pain signaling mechanisms, K⁺ currents, neurotransmitter release, membrane excitability, and/or cell growth, proliferation, or differentiation mechanisms), for example, in a clinical trial, cells can be isolated and RNA prepared and analyzed for the levels of expression of TWIK-9 and other genes implicated in the TWIK-9-associated disorder, respectively. The levels of gene expression (e.g., a gene expression pattern) can be quantified by northern blot analysis or RT-PCR, as described herein, or alternatively by measuring the amount of protein produced, by one of the methods as described herein, or by measuring the levels of activity of TWIK-9 or other genes. In this way, the gene expression pattern can serve as a marker, indicative of the physiological response of the cells to the agent. Accordingly, this response state may be determined before, and at various points during treatment of the individual with the agent.

[2332] In a preferred embodiment, the present invention provides a method for monitoring the effectiveness of treatment of a subject with an agent (e.g., an agonist, antagonist, peptidomimetic, protein, peptide, nucleic acid, small molecule, or other drug candidate identified by the screening assays described herein) including the steps of (i) obtaining a pre-administration sample from a subject prior to administration of the agent; (ii) detecting the level of expression of a TWIK-9 protein, mRNA, or genomic DNA in the preadministration sample; (iii) obtaining one or more post-administration samples from the subject; (iv) detecting the level of expression or activity of the TWIK-9 protein, mRNA, or genomic DNA in the post-administration samples; (v) comparing the level of expression or activity of the TWIK-9 protein, mRNA, or genomic DNA in the pre-administration sample with the TWIK-9 protein, mRNA, or genomic DNA in the post administration sample or samples; and (vi) altering the administration of the agent to the subject accordingly. For example, increased administration of the agent may be desirable to increase the expression or activity of TWIK-9 to higher levels than detected, i.e., to increase the effectiveness of the agent. Alternatively, decreased administration of the agent may be desirable to decrease expression or activity of TWIK-9 to lower levels than detected, i.e. to decrease the effectiveness of the agent. According to such an embodiment, TWIK-9 expression or activity may be used as an indicator of the effectiveness of an agent, even in the absence of an observable phenotypic response.

[2333] D. Methods of Treatment:

[2334] The present invention provides for both prophylactic and therapeutic methods of treating a subject at risk of (or susceptible to) a disorder or having a TWIK-9-associated disorder, e.g., a disorder associated with aberrant or unwanted TWIK-9 expression or activity, e.g., a potassium channel associated disorder such as a CNS disorder, a pain disorder, a cardiovascular disorder, or a cell proliferation, growth or differentiation disorder. With regards to both prophylactic and therapeutic methods of treatment, such treatments may be specifically tailored or modified, based on knowledge obtained from the field of pharmacogenomics. “Pharmacogenomics”, as used herein, refers to the application of genomics technologies such as gene sequencing, statistical genetics, and gene expression analysis to drugs in clinical development and on the market. More specifically, the term refers the study of how a patient's genes determine his or her response to a drug (e.g., a patient's “drug response phenotype”, or “drug response genotype”.) Thus, another aspect of the invention provides methods for tailoring an individual's prophylactic or therapeutic treatment with either the TWIK-9 molecules of the present invention or TWIK-9 modulators according to that individual's drug response genotype. Pharmacogenomics allows a clinician or physician to target prophylactic or therapeutic treatments to patients who will most benefit from the treatment and to avoid treatment of patients who will experience toxic drug-related side effects.

[2335] 1. Prophylactic Methods

[2336] In one aspect, the invention provides a method for preventing in a subject, a disease or condition associated with an aberrant or unwanted TWIK-9 expression or activity, by administering to the subject a TWIK-9 or an agent which modulates TWIK-9 expression or at least one TWIK-9 activity. Subjects at risk for a disease which is caused or contributed to by aberrant or unwanted TWIK-9 expression or activity can be identified by, for example, any or a combination of diagnostic or prognostic assays as described herein. Administration of a prophylactic agent can occur prior to the manifestation of symptoms characteristic of the TWIK-9 aberrancy, such that a disease or disorder is prevented or, alternatively, delayed in its progression. Depending on the type of TWIK-9 aberrancy, for example, a TWIK-9, TWIK-9 agonist or TWIK-9 antagonist agent can be used for treating the subject. The appropriate agent can be determined based on screening assays described herein.

[2337] 2. Therapeutic Methods

[2338] Another aspect of the invention pertains to methods of modulating TWIK-9 expression or activity for therapeutic purposes. Accordingly, in an exemplary embodiment, the modulatory method of the invention involves contacting a cell capable of expressing TWIK-9 with an agent that modulates one or more of the activities of TWIK-9 protein activity associated with the cell, such that TWIK-9 activity in the cell is modulated. An agent that modulates TWIK-9 protein activity can be an agent as described herein, such as a nucleic acid or a protein, a naturally-occurring target molecule of a TWIK-9 protein (e.g., a TWIK-9 ligand or substrate), a TWIK-9 antibody, a TWIK-9 agonist or antagonist, a peptidomimetic of a TWIK-9 agonist or antagonist, or other small molecule. In one embodiment, the agent stimulates one or more TWIK-9 activities. Examples of such stimulatory agents include active TWIK-9 protein and a nucleic acid molecule encoding TWIK-9 that has been introduced into the cell. In another embodiment, the agent inhibits one or more TWIK-9 activities. Examples of such inhibitory agents include antisense TWIK-9 nucleic acid molecules, anti-TWIK-9 antibodies, and TWIK-9 inhibitors. These modulatory methods can be performed in vitro (e.g., by culturing the cell with the agent) or, alternatively, in vivo (e.g., by administering the agent to a subject). As such, the present invention provides methods of treating an individual afflicted with a disease or disorder characterized by aberrant or unwanted expression or activity of a TWIK-9 protein or nucleic acid molecule. In one embodiment, the method involves administering an agent (e.g., an agent identified by a screening assay described herein), or combination of agents that modulates (e.g., upregulates or downregulates) TWIK-9 expression or activity. In another embodiment, the method involves administering a TWIK-9 protein or nucleic acid molecule as therapy to compensate for reduced, aberrant, or unwanted TWIK-9 expression or activity.

[2339] The term “treatment” as used herein, is defined as the application or administration of a therapeutic agent to a patient, or application or administration of a therapeutic agent to an isolated tissue or cell line from a patient, who has a disease, a symptom of disease or a predisposition toward a disease, with the purpose to cure, heal, alleviate, relieve, alter, remedy, ameliorate, improve or affect the disease, the symptoms of disease or the predisposition toward disease. A therapeutic agent includes, but is not limited to, small molecules, peptides, antibodies, ribozymes and antisense oligonucleotides.

[2340] Stimulation of TWIK-9 activity is desirable in situations in which TWIK-9 is abnormally downregulated and/or in which increased TWIK-9 activity is likely to have a beneficial effect. Likewise, inhibition of TWIK-9 activity is desirable in situations in which TWIK-9 is abnormally upregulated and/or in which decreased TWIK-9 activity is likely to have a beneficial effect.

[2341] 3. Pharmacogenomics

[2342] The TWIK-9 molecules of the present invention, as well as agents, or modulators which have a stimulatory or inhibitory effect on TWIK-9 activity (e.g., TWIK-9 gene expression) as identified by a screening assay described herein can be administered to individuals to treat (prophylactically or therapeutically) TWIK-9-associated disorders (e.g., a CNS disorder, a pain disorder, a cardiovascular disorder, or a cell proliferation, growth or differentiation disorder) associated with aberrant or unwanted TWIK-9 activity. In conjunction with such treatment, pharmacogenomics (i.e., the study of the relationship between an individual's genotype and that individual's response to a foreign compound or drug) may be considered. Differences in metabolism of therapeutics can lead to severe toxicity or therapeutic failure by altering the relation between dose and blood concentration of the pharmacologically active drug. Thus, a physician or clinician may consider applying knowledge obtained in relevant pharmacogenomics studies in determining whether to administer a TWIK-9 molecule or TWIK-9 modulator as well as tailoring the dosage and/or therapeutic regimen of treatment with a TWIK-9 molecule or TWIK-9 modulator.

[2343] Pharmacogenomics deals with clinically significant hereditary variations in the response to drugs due to altered drug disposition and abnormal action in affected persons. See, for example, Eichelbaum, M. et al. (1996) Clin. Exp. Pharmacol. Physiol. 23(10-11):983-985 and Linder, M. W. et al. (1997) Clin. Chem. 43(2):254-266. In general, two types of pharmacogenetic conditions can be differentiated. Genetic conditions transmitted as a single factor altering the way drugs act on the body (altered drug action) or genetic conditions transmitted as single factors altering the way the body acts on drugs (altered drug metabolism). These pharmacogenetic conditions can occur either as rare genetic defects or as naturally-occurring polymorphisms. For example, glucose-6-phosphate methyltransferase deficiency (G6PD) is a common inherited enzymopathy in which the main clinical complication is haemolysis after ingestion of oxidant drugs (anti-malarials, sulfonamides, analgesics, nitrofurans) and consumption of fava beans.

[2344] One pharmacogenomics approach to identifying genes that predict drug response, known as “a genome-wide association”, relies primarily on a high-resolution map of the human genome consisting of already known gene-related markers (e.g., a “bi-allelic” gene marker map which consists of 60,000-100,000 polymorphic or variable sites on the human genome, each of which has two variants.) Such a high-resolution genetic map can be compared to a map of the genome of each of a statistically significant number of patients taking part in a Phase II/III drug trial to identify markers associated with a particular observed drug response or side effect. Alternatively, such a high resolution map can be generated from a combination of some ten-million known single nucleotide polymorphisms (SNPs) in the human genome. As used herein, a “SNP” is a common alteration that occurs in a single nucleotide base in a stretch of DNA. For example, a SNP may occur once per every 1000 bases of DNA. A SNP may be involved in a disease process, however, the vast majority may not be disease-associated. Given a genetic map based on the occurrence of such SNPs, individuals can be grouped into genetic categories depending on a particular pattern of SNPs in their individual genome. In such a manner, treatment regimens can be tailored to groups of genetically similar individuals, taking into account traits that may be common among such genetically similar individuals.

[2345] Alternatively, a method termed the “candidate gene approach” can be utilized to identify genes that predict drug response. According to this method, if a gene that encodes a drug's target is known (e.g., a TWIK-9 protein of the present invention), all common variants of that gene can be fairly easily identified in the population and it can be determined if having one version of the gene versus another is associated with a particular drug response.

[2346] As an illustrative embodiment, the activity of drug metabolizing enzymes is a major determinant of both the intensity and duration of drug action. The discovery of genetic polymorphisms of drug metabolizing enzymes (e.g., N-methyltransferase 2 (NAT 2) and cytochrome P450 enzymes CYP2D6 and CYP2C19) has provided an explanation as to why some patients do not obtain the expected drug effects or show exaggerated drug response and serious toxicity after taking the standard and safe dose of a drug. These polymorphisms are expressed in two phenotypes in the population, the extensive metabolizer (EM) and poor metabolizer (PM). The prevalence of PM is different among different populations. For example, the gene coding for CYP2D6 is highly polymorphic and several mutations have been identified in PM, which all lead to the absence of functional CYP2D6. Poor metabolizers of CYP2D6 and CYP2C19 quite frequently experience exaggerated drug response and side effects when they receive standard doses. If a metabolite is the active therapeutic moiety, PM show no therapeutic response, as demonstrated for the analgesic effect of codeine mediated by its CYP2D6-formed metabolite morphine. The other extreme are the so called ultra-rapid metabolizers who do not respond to standard doses. Recently, the molecular basis of ultra-rapid metabolism has been identified to be due to CYP2D6 gene amplification.

[2347] Alternatively, a method termed the “gene expression profiling”, can be utilized to identify genes that predict drug response. For example, the gene expression of an animal dosed with a drug (e.g., a TWIK-9 molecule or TWIK-9 modulator of the present invention) can give an indication whether gene pathways related to toxicity have been turned on.

[2348] Information generated from more than one of the above pharmacogenomics approaches can be used to determine appropriate dosage and treatment regimens for prophylactic or therapeutic treatment an individual. This knowledge, when applied to dosing or drug selection, can avoid adverse reactions or therapeutic failure and thus enhance therapeutic or prophylactic efficiency when treating a subject with a TWIK-9 molecule or TWIK-9 modulator, such as a modulator identified by one of the exemplary screening assays described herein.

[2349] 4. Use of TWIK-9 Molecules as Surrogate Markers

[2350] The TWIK-9 molecules of the invention are also useful as markers of disorders or disease states, as markers for precursors of disease states, as markers for predisposition of disease states, as markers of drug activity, or as markers of the pharmacogenomic profile of a subject. Using the methods described herein, the presence, absence and/or quantity of the TWIK-9 molecules of the invention may be detected, and may be correlated with one or more biological states in vivo. For example, the TWIK-9 molecules of the invention may serve as surrogate markers for one or more disorders or disease states or for conditions leading up to disease states.

[2351] As used herein, a “surrogate marker” is an objective biochemical marker which correlates with the absence or presence of a disease or disorder, or with the progression of a disease or disorder (e.g., with the presence or absence of a tumor). The presence or quantity of such markers is independent of the causation of the disease. Therefore, these markers may serve to indicate whether a particular course of treatment is effective in lessening a disease state or disorder. Surrogate markers are of particular use when the presence or extent of a disease state or disorder is difficult to assess through standard methodologies (e.g., early stage tumors), or when an assessment of disease progression is desired before a potentially dangerous clinical endpoint is reached (e.g., an assessment of cardiovascular disease may be made using cholesterol levels as a surrogate marker, and an analysis of HIV infection may be made using HIV RNA levels as a surrogate marker, well in advance of the undesirable clinical outcomes of myocardial infarction or fully-developed AIDS). Examples of the use of surrogate markers in the art include: Koomen et al. (2000) J. Mass. Spectrom. 35:258-264; and James (1994) AIDS Treatment News Archive 209.

[2352] The TWIK-9 molecules of the invention are also useful as pharmacodynamic markers. As used herein, a “pharmacodynamic marker” is an objective biochemical marker which correlates specifically with drug effects. The presence or quantity of a pharmacodynamic marker is not related to the disease state or disorder for which the drug is being administered; therefore, the presence or quantity of the marker is indicative of the presence or activity of the drug in a subject. For example, a pharmacodynamic marker may be indicative of the concentration of the drug in a biological tissue, in that the marker is either expressed or transcribed or not expressed or transcribed in that tissue in relationship to the level of the drug. In this fashion, the distribution or uptake of the drug may be monitored by the pharmacodynamic marker. Similarly, the presence or quantity of the pharmacodynamic marker may be related to the presence or quantity of the metabolic product of a drug, such that the presence or quantity of the marker is indicative of the relative breakdown rate of the drug in vivo. Pharmacodynamic markers are of particular use in increasing the sensitivity of detection of drug effects, particularly when the drug is administered in low doses. Since even a small amount of a drug may be sufficient to activate multiple rounds of marker (e.g., a TWIK-9 marker) transcription or expression, the amplified marker may be in a quantity which is more readily detectable than the drug itself. Also, the marker may be more easily detected due to the nature of the marker itself; for example, using the methods described herein, anti-TWIK-9 antibodies may be employed in an immune-based detection system for a TWIK-9 protein marker, or TWIK-9-specific radiolabeled probes may be used to detect a TWIK-9 mRNA marker. Furthermore, the use of a pharmacodynamic marker may offer mechanism-based prediction of risk due to drug treatment beyond the range of possible direct observations. Examples of the use of pharmacodynamic markers in the art include: Matsuda et al. U.S. Pat. No. 6,033,862; Hattis et al. (1991) Env. Health Perspect. 90:229-238; Schentag (1999) Am. J. Health-Syst. Pharm. 56 Suppl. 3:S21-S24; and Nicolau (1999) Am. J. Health-Syst. Pharm. 56 Suppl. 3:S16-S20.

[2353] The TWIK-9 molecules of the invention are also useful as pharmacogenomic markers. As used herein, a “pharmacogenomic marker” is an objective biochemical marker which correlates with a specific clinical drug response or susceptibility in a subject (see, e.g., McLeod et al. (1999) Eur. J. Cancer 35(12):1650-1652). The presence or quantity of the pharmacogenomic marker is related to the predicted response of the subject to a specific drug or class of drugs prior to administration of the drug. By assessing the presence or quantity of one or more pharmacogenomic markers in a subject, a drug therapy which is most appropriate for the subject, or which is predicted to have a greater degree of success, may be selected. For example, based on the presence or quantity of RNA, or protein (e.g., TWIK-9 protein or RNA) for specific tumor markers in a subject, a drug or course of treatment may be selected that is optimized for the treatment of the specific tumor likely to be present in the subject. Similarly, the presence or absence of a specific sequence mutation in TWIK-9 DNA may correlate TWIK-9 drug response. The use of pharmacogenomic markers therefore permits the application of the most appropriate treatment for each subject without having to administer the therapy.

[2354] 5. Electronic Apparatus Readable Media and Arrays

[2355] Electronic apparatus readable media comprising MAGK sequence information is also provided. As used herein, “MAGK sequence information” refers to any nucleotide and/or amino acid sequence information particular to the MAGK molecules of the present invention, including but not limited to full-length nucleotide and/or amino acid sequences, partial nucleotide and/or amino acid sequences, polymorphic sequences including single nucleotide polymorphisms (SNPs), epitope sequences, and the like. Moreover, information “related to” said MAGK sequence information includes detection of the presence or absence of a sequence (e.g., detection of expression of a sequence, fragment, polymorphism, etc.), determination of the level of a sequence (e.g., detection of a level of expression, for example, a quantitative detection), detection of a reactivity to a sequence (e.g., detection of protein expression and/or levels, for example, using a sequence-specific antibody), and the like. As used herein, “electronic apparatus readable media” refers to any suitable medium for storing, holding or containing data or information that can be read and accessed directly by an electronic apparatus. Such media can include, but are not limited to: magnetic storage media, such as floppy discs, hard disc storage medium, and magnetic tape; optical storage media such as compact disc; electronic storage media such as RAM, ROM, EPROM, EEPROM and the like; general hard disks and hybrids of these categories such as magnetic/optical storage media. The medium is adapted or configured for having recorded thereon MAGK sequence information of the present invention.

[2356] As used herein, the term “electronic apparatus” is intended to include any suitable computing or processing apparatus or other device configured or adapted for storing data or information. Examples of electronic apparatus suitable for use with the present invention include stand-alone computing apparatus; networks, including a local area network (LAN), a wide area network (WAN) Internet, Intranet, and Extranet; electronic appliances such as a personal digital assistants (PDAs), cellular phone, pager and the like; and local and distributed processing systems.

[2357] As used herein, “recorded” refers to a process for storing or encoding information on the electronic apparatus readable medium. Those skilled in the art can readily adopt any of the presently known methods for recording information on known media to generate manufactures comprising the MAGK sequence information.

[2358] A variety of software programs and formats can be used to store the sequence information on the electronic apparatus readable medium. For example, the sequence information can be represented in a word processing text file, formatted in commercially-available software such as WordPerfect and Microsoft Word, or represented in the form of an ASCII file, stored in a database application, such as DB2, Sybase, Oracle, or the like, as well as in other forms. Any number of data processor structuring formats (e.g., text file or database) may be employed in order to obtain or create a medium having recorded thereon the MAGK sequence information.

[2359] By providing MAGK sequence information in readable form, one can routinely access the sequence information for a variety of purposes. For example, one skilled in the art can use the sequence information in readable form to compare a target sequence or target structural motif with the sequence information stored within the data storage means. Search means are used to identify fragments or regions of the sequences of the invention which match a particular target sequence or target motif.

[2360] The present invention therefore provides a medium for holding instructions for performing a method for determining whether a subject has a MAGK-associated disease or disorder or a pre-disposition to a MAGK-associated disease or disorder, wherein the method comprises the steps of determining MAGK sequence information associated with the subject and based on the MAGK sequence information, determining whether the subject has a MAGK-associated disease or disorder or a pre-disposition to a MAGK-associated disease or disorder and/or recommending a particular treatment for the disease, disorder or pre-disease condition.

[2361] The present invention further provides in an electronic system and/or in a network, a method for determining whether a subject has a MAGK-associated disease or disorder or a pre-disposition to a disease associated with a MAGK wherein the method comprises the steps of determining MAGK sequence information associated with the subject, and based on the MAGK sequence information, determining whether the subject has a MAGK-associated disease or disorder or a pre-disposition to a MAGK-associated disease or disorder, and/or recommending a particular treatment for the disease, disorder or pre-disease condition. The method may further comprise the step of receiving phenotypic information associated with the subject and/or acquiring from a network phenotypic information associated with the subject.

[2362] The present invention also provides in a network, a method for determining whether a subject has a MAGK-associated disease or disorder or a pre-disposition to a MAGK associated disease or disorder associated with MAGK, said method comprising the steps of receiving MAGK sequence information from the subject and/or information related thereto, receiving phenotypic information associated with the subject, acquiring information from the network corresponding to MAGK and/or a MAGK-associated disease or disorder, and based on one or more of the phenotypic information, the MAGK information (e.g., sequence information and/or information related thereto), and the acquired information, determining whether the subject has a MAGK-associated disease or disorder or a pre-disposition to a MAGK-associated disease or disorder (e.g., a cellular growth or proliferation disease or disorder, for example, cancer). The method may further comprise the step of recommending a particular treatment for the disease, disorder or pre-disease condition.

[2363] The present invention also provides a business method for determining whether a subject has a MAGK-associated disease or disorder or a pre-disposition to a MAGK-associated disease or disorder, said method comprising the steps of receiving information related to MAGK (e.g., sequence information and/or information related thereto), receiving phenotypic information associated with the subject, acquiring information from the network related to MAGK and/or related to a MAGK-associated disease or disorder, and based on one or more of the phenotypic information, the MAGK information, and the acquired information, determining whether the subject has a MAGK-associated disease or disorder or a pre-disposition to a MAGK-associated disease or disorder. The method may further comprise the step of recommending a particular treatment for the disease, disorder or pre-disease condition.

[2364] The invention also includes an array comprising a MAGK sequence of the present invention. The array can be used to assay expression of one or more genes in the array. In one embodiment, the array can be used to assay gene expression in a tissue to ascertain tissue specificity of genes in the array. In this manner, up to about 7600 genes can be simultaneously assayed for expression, one of which can be MAGK. This allows a profile to be developed showing a battery of genes specifically expressed in one or more tissues.

[2365] In addition to such qualitative determination, the invention allows the quantitation of gene expression. Thus, not only tissue specificity, but also the level of expression of a battery of genes in the tissue is ascertainable. Thus, genes can be grouped on the basis of their tissue expression per se and level of expression in that tissue. This is useful, for example, in ascertaining the relationship of gene expression between or among tissues. Thus, one tissue can be perturbed and the effect on gene expression in a second tissue can be determined. In this context, the effect of one cell type on another cell type in response to a biological stimulus can be determined. Such a determination is useful, for example, to know the effect of cell-cell interaction at the level of gene expression. If an agent is administered therapeutically to treat one cell type but has an undesirable effect on another cell type, the invention provides an assay to determine the molecular basis of the undesirable effect and thus provides the opportunity to co-administer a counteracting agent or otherwise treat the undesired effect. Similarly, even within a single cell type, undesirable biological effects can be determined at the molecular level. Thus, the effects of an agent on expression of other than the target gene can be ascertained and counteracted.

[2366] In another embodiment, the array can be used to monitor the time course of expression of one or more genes in the array. This can occur in various biological contexts, as disclosed herein, for example development of a MAGK-associated disease or disorder, progression of MAGK-associated disease or disorder, and processes, such a cellular transformation associated with the MAGK-associated disease or disorder.

[2367] The array is also useful for ascertaining the effect of the expression of a gene on the expression of other genes in the same cell or in different cells (e.g., ascertaining the effect of MAGK expression on the expression of other genes). This provides, for example, for a selection of alternate molecular targets for therapeutic intervention if the ultimate or downstream target cannot be regulated.

[2368] The array is also useful for ascertaining differential expression patterns of one or more genes in normal and abnormal cells. This provides a battery of genes (e.g., including MAGK) that could serve as a molecular target for diagnosis or therapeutic intervention.

[2369] This invention is further illustrated by the following examples which should not be construed as limiting. The contents of all references, patents and published patent applications cited throughout this application, as well as the Figures and the Sequence Listing, are incorporated herein by reference.

### EXAMPLES

### Example 1

### Identification and Characterization of Human TWIK-9 cDNA

[2370] In this example, the identification and characterization of the gene encoding human TWIK-9 (clone Fbh56115) is described.

[2371] Isolation of the Human TWIK-9 cDNA

[2372] The invention is based, at least in part, on the discovery of a human gene encoding a novel member of the TWIK-like family of potassium channels. The entire sequence of human clone Fbh56115 was determined and found to contain an open reading frame termed human “TWIK-9”.

[2373] The nucleotide sequence encoding the human TWIK-9 is shown in FIG. 38 and is set forth as SEQ ID NO:40. The protein encoded by this nucleic acid comprises about 374 amino acids and has the amino acid sequence shown in FIG. 38 and set forth as SEQ ID NO:41. The coding region (open reading frame) of SEQ ID NO:40 is set forth as SEQ ID NO:42. Clone Fbh56115, comprising the coding region of human TWIK-9, was deposited with the American Type Culture Collection (ATCC®), 10801 University Boulevard, Manassas, Va. 20110-2209, on ______, and assigned Accession No. ______.

[2374] Analysis of the Human TWIK-9 Molecules

[2375] The amino acid sequence set forth as SEQ ID NO:41 was searched against the Washington University HMM database (FIG. 40). This search resulted in the identification of the protein of SEQ ID NO:41 as a “TWIK channel” family member, e.g., as having a score of 587.6 when aligned to the TWIK family HMM having PFAM Accession No. PF02034.

[2376] Analysis of the amino acid sequence of human TWIK-9 was also performed using MEMSAT. This analysis resulted in the identification of potential transmembrane domains in the amino acid sequence of human TWIK-9 at residues 9-26, 80-96, 108-125, 159-178, 190-208 and 219-243 of SEQ ID NO:41. Further analysis of the TWIK-9 amino acid sequence resulted in a determination that residues 80-96 and 190-208 of SEQ ID NO:41, in fact, correspond to P-loops or pores, as defined herein. Yet further analysis of the TWIK-9 amino acid sequence resulted in a determination that residues 9-26, 108-125, 159-178 and 219-243 correspond to transmembrane domain 1, transmembrane domain 2, transmembrane domain 3 and transmembrane domain 4, respectively. Moreover, amino acid residues 346-362 are predicted not to correspond to a transmembrane domain due, at least in part, to the low score of 0.2

[2377] The amino acid sequence of human TWIK-9 was also analyzed using the program PSORT (http://www.psort.nibb.ac.jp) to predict potential localization of the protein within the cell. This program assesses the presence of different targeting and localization amino acid sequences within the query sequence. The results of the analyses show that human TWIK-9 could be localized to the endoplasmic reticulum, if found intracellularly.

[2378] A SignalP signal peptide prediction program also recognized the hydrophobic nature of transmembrane domain 1 as a possible signal sequence, e.g., at about amino acids 1-24 of SEQ ID NO:41, although signal and structural analysis as described above indicates more strongly that residues 9-26 are a transmembrane domain.

[2379] Searches of the amino acid sequence of human TWIK-9 were further performed against the Prosite database, and resulted in the identification of several possible phosphorylation sites within the amino acid sequence of human TWIK-9 (SEQ ID NO:41). Protein kinase C phosphorylation sites were identified at residues319-321, 331-333 and 341-343; a cAMP and cGMP dependent protein kinase phosphorylation site was identified at residues 370-373; and casein kinase II phosphorylation sites were identified at residues 31-34, 55-58, 127-130, 179-182, 251-254 and 360-363 of human TWIK-9. The search also identified the presence of a N-glycosylation site motif at amino acid residues 53-56; and N-myristoylation site motifs at amino acid residues 102-107, 117-122, 148-153, 236-241 and 266-271 of human TWIK-9.

[2380] To further identify potential structural and/or functional properties in a protein of interest, the amino acid sequence of the protein is searched against a database of annotated protein domains (e.g., the ProDom database) using the default parameters (available at http://www.toulouse.inra.fr/prodom.html). A search of the amino acid sequence of human TWIK-9 (SEQ ID NO:41) was performed against the ProDom database. This search resulted in the local alignment of the human TWIK-9 protein with various potassium channel proteins. Specifically, amino acid residues 1-77, 75-212, 78-246, 78-247, 247-327, 288-374 and 328-374 of SEQ ID NO:41 have significant identity to various potassium channel proteins, e.g., various TWIK-related, acid-sensitive, potassium channels and/or other potassium channel subfamily members.

[2381] Tissue Distribution of TWIK-9 mRNA

[2382] TWIK-9 expression was also determined by PCR analysis of cDNA libraries from various tissues and cell lines. Detecting expression by a library array procedure entailed preparing a PCR mixture including Taq Polymerase, dNTPs, and PCR buffer, and adding a vector primer, a primer internal to the gene of interest, and an aliquot of a library in which expression was to be tested. This procedure was performed with many libraries at a time in a 96 well PCR tray, with 80 or more wells containing libraries and a control well in which the above primers were combined with the clone of interest itself. The control well served as an indicator of the fragment size to be expected in the library wells, in the event the clone of interest was expressed within. Amplification was performed in a PCR machine, employing standard PCR conditions for denaturing, annealing, and elongation, and the resultant mixture was mixed with an appropriate loading dye and run on an ethidium bromide-stained agarose gel. The gel was later viewed with UV light after the DNA loaded within its lanes had time to migrate into the gels. Lanes in which a band corresponding with the control band was visible indicated the libraries in which the clone of interest was expressed.

[2383] TWIK-9 was expressed in mouse fetal brain, fetal thymus, cerebellum, dorsal root ganglia, testes, and mammary gland, as well as in Th2 induced T cells and WI-38 cells released from serum starvation.

### Example 2

### Expression of Recombinant TWIK-9 Protein in Bacterial Cells

[2384] In this example, human TWIK-9 is expressed as a recombinant glutathione-S-transferase (GST) fusion polypeptide in E. coli and the fusion polypeptide is isolated and characterized. Specifically, human TWIK-9 is fused to GST and this fusion polypeptide is expressed in E. coli, e.g., strain PEB199. Expression of the GST-TWIK-9 fusion protein in PEB199 is induced with IPTG. The recombinant fusion polypeptide is purified from crude bacterial lysates of the induced PEB199 strain by affinity chromatography on glutathione beads. Using polyacrylamide gel electrophoretic analysis of the polypeptide purified from the bacterial lysates, the molecular weight of the resultant fusion polypeptide is determined.

### Example 3

### Expression of Recombinant TWIK-9 Protein in COS Cells

[2385] To express the TWIK-9 gene in COS cells, the pcDNA/Amp vector by Invitrogen Corporation (San Diego, Calif.) is used. This vector contains an SV40 origin of replication, an ampicillin resistance gene, an E. coli replication origin, a CMV promoter followed by a polylinker region, and an SV40 intron and polyadenylation site. A DNA fragment encoding the entire TWIK-9 protein and an HA tag (Wilson et al. (1984) Cell 37:767) or a FLAG tag fused in-frame to its 3′ end of the fragment is cloned into the polylinker region of the vector, thereby placing the expression of the recombinant protein under the control of the CMV promoter.

[2386] To construct the plasmid, the TWIK-9 DNA sequence is amplified by PCR using two primers. The 5′ primer contains the restriction site of interest followed by approximately twenty nucleotides of the TWIK-9 coding sequence starting from the initiation codon; the 3′ end sequence contains complementary sequences to the other restriction site of interest, a translation stop codon, the HA tag or FLAG tag and the last 20 nucleotides of the TWIK-9 coding sequence. The PCR amplified fragment and the pCDNA/Amp vector are digested with the appropriate restriction enzymes and the vector is dephosphorylated using the CIAP enzyme (New England Biolabs, Beverly, Mass.). Preferably the two restriction sites chosen are different so that the TWIK-9 gene is inserted in the correct orientation. The ligation mixture is transformed into E. coli cells (strains HB101, DH5□, SURE, available from Stratagene Cloning Systems, La Jolla, Calif., can be used), the transformed culture is plated on ampicillin media plates, and resistant colonies are selected. Plasmid DNA is isolated from transformants and examined by restriction analysis for the presence of the correct fragment.

[2387] COS cells are subsequently transfected with the TWIK-9-pcDNA/Amp plasmid DNA using the calcium phosphate or calcium chloride co-precipitation methods, DEAE-dextran-mediated transfection, lipofection, or electroporation. Other suitable methods for transfecting host cells can be found in Sambrook, J., Fritsh, E. F., and Maniatis, T. Molecular Cloning: A Laboratory Manual. 2^{nd}, ed., Cold Spring Harbor Laboratory, Cold Spring Harbor Laboratory Press, Cold Spring Harbor, N.Y., 1989. The expression of the TWIK-9 polypeptide is detected by radiolabeling (³⁵S-methionine or ³⁵S-cysteine available from NEN, Boston, Mass., can be used) and immunoprecipitation (Harlow, E. and Lane, D. Antibodies: A Laboratory Manual, Cold Spring Harbor Laboratory Press, Cold Spring Harbor, N.Y., 1988) using an HA specific monoclonal antibody. Briefly, the cells are labeled for 8 hours with ³⁵S-methionine (or ³⁵S-cysteine). The culture media are then collected and the cells are lysed using detergents (RIPA buffer, 150 mM NaCl, 1% NP-40, 0.1% SDS, 0.5% DOC, 50 mM Tris, pH 7.5). Both the cell lysate and the culture media are precipitated with an HA specific monoclonal antibody. Precipitated polypeptides are then analyzed by SDS-PAGE.

[2388] Alternatively, DNA containing the TWIK-9 coding sequence is cloned directly into the polylinker of the pCDNA/Amp vector using the appropriate restriction sites. The resulting plasmid is transfected into COS cells in the manner described above, and the expression of the TWIK-9 polypeptide is detected by radiolabeling and immunoprecipitation using a TWIK-9 specific monoclonal antibody.

### IX. 25658, A NOVEL HUMAN CALCIUM CHANNEL SUBUNIT AND USES THEREOF

### Background of the Invention

[2389] Ion channels constitute a large family of membrane-bound proteins responsible for a wide range of important transport and signaling functions in cells. The ion channel family includes at least three subfamilies: calcium ion channels (Ca²⁺ channels), potassium channels (K⁺ channels) and sodium channels (Na⁺ channels). Members of this family regulate ion selectivity in response to a specific stimulus such as a change in voltage across a biological membrane (voltage-gated channels), a mechanical stress (mechanically gated channels, or the binding of a ligand (ligand-gated channels). Gated channels share several features: (1) sensors that are sensitive to chemical or physical signals, (2) gates that open and close in response to the sensors, (3) a pore that selectively permeates ions, and (4) a selectivity filter that permits the channel an ionic discrimination capacity (Triggle (1999) Europ. J. Pharmacol. 375:311-325).

[2390] Voltage-gated channel superfamily members are present in the plasma membrane of all electrically excitable cells including neuronal, muscle, endocrine, and egg cells. These channels are responsible for the generation of action potentials that are triggered by depolarization of the plasma membrane (i.e., a shift in the membrane potential to a less negative value). This superfamily includes the voltage-gated Ca²⁺ channels which regulate Ca²⁺ concentrations in a cell in response to depolarization.

[2391] The voltage-gated Ca²⁺ channel is a multisubunit complex consisting of at least three different subunits: α₁, β, and α₂δ subunits (Felix et al. (1997) J. Neurosci. 17:6884-6891). The α₁ subunit is the pore forming subunit, while the β and α₂δ subunits are regulatory subunits responsible for current amplitude. Five subclasses of voltage-gated Ca²⁺ channels have been identified based on biophysical and pharmacological properties: T-, N-, P/Q-, R-, and L-types. Each subtype expresses a distinct α₁ subunit and has a selective association with the β, and α₂δ subunits. The P/Q, N, and R subclasses have a neuronal expression, the T subclass has a widespread expression, and the L subclass is expressed in neuroendocrine cells, cardiac cells, smooth muscle cells, and skeletal muscle cells.

[2392] Three α₂δ subunits have been identified to date (Klugbauer et al. (1999) J. Neurosci. 19:684-691). The subunits have very little sequence homology, but share several structural characteristics such as containing numerous glycosylation sites and cysteine residues, having similar hydropathy profiles and similar electrophysiological characteristics. α₂δ subunits are expressed in various tissues including heart, pancreas, skeletal muscle, and brain.

[2393] Calcium signaling has been implicated in the regulation of a variety of cellular responses, such as growth and differentiation. Voltage-gated Ca²⁺ channels in particular have been associated with the regulation disorders such as angina, atrial fibrillation and flutter, hypertension, peripheral vascular disorders, and cerebral vasospasm (Triggle (1999) Europ. J. Pharmacol. 375:311-325).

### Summary of the Invention

[2394] The present invention is based, at least in part, on the discovery of a novel class of alpha-2/delta subunits of the voltage-gated Ca²⁺ channel superfamily, referred to herein as “alpha-2/delta-4” or “α₂δ-4” nucleic acid and polypeptide molecules. The α₂δ-4 nucleic acid and polypeptide molecules of the present invention are useful as modulating agents in regulating a variety of cellular processes, e.g., muscle contraction, membrane excitability, neurite outgrowth and synaptogenesis, signal transduction, cell proliferation, growth, differentiation, and migration, and nociception. Accordingly, in one aspect, this invention provides isolated nucleic acid molecules encoding α₂δ-4 polypeptides or biologically active portions thereof, as well as nucleic acid fragments suitable as primers or hybridization probes for the detection of α₂δ-4-encoding nucleic acids.

[2395] In one embodiment, the invention features an isolated nucleic acid molecule that includes the nucleotide sequence set forth in SEQ ID NO:43 or 45. In another embodiment, the invention features an isolated nucleic acid molecule that encodes a polypeptide including the amino acid sequence set forth in SEQ ID NO:44. In another embodiment, the invention features an isolated nucleic acid molecule that includes the nucleotide sequence contained in the plasmid deposited with ATCC® as Accession Number ______.

[2396] In still other embodiments, the invention features isolated nucleic acid molecules including nucleotide sequences that are substantially identical (e.g., 60% identical) to the nucleotide sequence set forth as SEQ ID NO:43 or 45. The invention further features isolated nucleic acid molecules including at least 50 contiguous nucleotides of the nucleotide sequence set forth as SEQ ID NO:43 or 45. In another embodiment, the invention features isolated nucleic acid molecules which encode a polypeptide including an amino acid sequence that is substantially identical (e.g., 60% identical) to the amino acid sequence set forth as SEQ ID NO:44. The present invention also features nucleic acid molecules which encode allelic variants of the polypeptide having the amino acid sequence set forth as SEQ ID NO:44. In addition to isolated nucleic acid molecules encoding full-length polypeptides, the present invention also features nucleic acid molecules which encode fragments, for example, biologically active or antigenic fragments, of the full-length polypeptides of the present invention (e.g., fragments including at least 10 contiguous amino acid residues of the amino acid sequence of SEQ ID NO:44). In still other embodiments, the invention features nucleic acid molecules that are complementary to, antisense to, or hybridize under stringent conditions to the isolated nucleic acid molecules described herein.

[2397] In another aspect, the invention provides vectors including the isolated nucleic acid molecules described herein (e.g., α₂δ-4-encoding nucleic acid molecules). Such vectors can optionally include nucleotide sequences encoding heterologous polypeptides. Also featured are host cells including such vectors (e.g., host cells including vectors suitable for producing α₂δ-4 nucleic acid molecules and polypeptides).

[2398] In another aspect, the invention features isolated α₂δ-4 polypeptides and/or biologically active or antigenic fragments thereof Exemplary embodiments feature a polypeptide including the amino acid sequence set forth as SEQ ID NO:44, a polypeptide including an amino acid sequence at least 60% identical to the amino acid sequence set forth as SEQ ID NO:44, a polypeptide encoded by a nucleic acid molecule including a nucleotide sequence at least 60% identical to the nucleotide sequence set forth as SEQ ID NO:43 or 45. Also featured are fragments of the full-length polypeptides described herein (e.g., fragments including at least 10 contiguous amino acid residues of the sequence set forth as SEQ ID NO:44) as well as allelic variants of the polypeptide having the amino acid sequence set forth as SEQ ID NO:44.

[2399] The α₂δ-4 polypeptides and/or biologically active or antigenic fragments thereof, are useful, for example, as reagents or targets in assays applicable to treatment and/or diagnosis of α₂δ-4 mediated or related disorders. In one embodiment, an α₂δ-4 polypeptide or fragment thereof, has an α₂δ-4 activity. In another embodiment, an α₂δ-4 polypeptide or fragment thereof, has a transmembrane domain, and optionally, has an α₂δ-4 activity. In a related aspect, the invention features antibodies (e.g., antibodies which specifically bind to any one of the polypeptides described herein) as well as fusion polypeptides including all or a fragment of a polypeptide described herein.

[2400] The present invention further features methods for detecting α₂δ-4 polypeptides and/or α₂δ-4 nucleic acid molecules, such methods featuring, for example, a probe, primer or antibody described herein. Also featured are kits e.g., kits for the detection of α₂δ-4 polypeptides and/or α₂δ-4 nucleic acid molecules. In a related aspect, the invention features methods for identifying compounds which bind to and/or modulate the activity of an α₂δ-4 polypeptide or α₂δ-4 nucleic acid molecule described herein. Further featured are methods for modulating an α₂δ-4 activity.

[2401] Other features and advantages of the invention will be apparent from the following detailed description and claims.

### Detailed Description of the Invention

[2402] The present invention is based, at least in part, on the discovery of novel molecules, referred to herein as “alpha-2/delta-4” or “α₂δ-4” nucleic acid and polypeptide molecules, which are novel members of the ion channel, e.g., voltage-gated Ca²⁺ channel, family. These novel molecules are capable of, for example, modulating an ion-channel mediated activity (e.g., a calcium channel-mediated activity) in a cell, e.g., a neuronal, muscle (e.g., smooth muscle (e.g., cardiac or vascular) or skeletal muscle), or neuroendocrine cell.

[2403] As used herein, an “ion channel” includes a protein or polypeptide which is involved in receiving, conducting, and transmitting signals in an electrically excitable cell, e.g., a neuronal, muscle, or neuroendocrine cell. As used herein, a “voltage-gated calcium channel” includes a protein or polypeptide which is involved in receiving, conducting, and transmitting calcium ion-based signals in an electrically excitable cell. Voltage-gated calcium channels are calcium ion selective, and can determine membrane excitability (the ability of, for example, a muscle cell to contract). Voltage-gated calcium channels can also influence the resting potential of membranes, wave forms and frequencies of action potentials, and thresholds of excitation. Voltage-gated calcium channels are typically expressed in electrically excitable cells, e.g., muscle cells, and may form heteromultimeric structures (e.g., composed of more than one type of subunit). Voltage-gated calcium channels may also be found in non-excitable cells (e.g., adipose cells or liver cells), where they may play a role in, e.g., signal transduction. Examples of voltage-gated calcium channels include the low-voltage-gated channels and the high-voltage-gated channels. Voltage-gated calcium channels are described in, for example, Davila et al. (1999) Annals New York Academy of Sciences 868:102-17 and McEnery, M. W. et al. (1998) J. Bioenergetics and Biomembranes 30(4): 409-418, the contents of which are incorporated herein by reference. As the α₂δ-4 molecules of the present invention are calcium channel subunits capable of modulating ion channel mediated activities (e.g., calcium channel mediated activities), they may be useful for developing novel diagnostic and therapeutic agents for ion channel associated disorders (e.g., calcium channel associated disorders).

[2404] As used herein, an “ion channel associated disorder” includes a disorder, disease or condition which is characterized by a misregulation of an ion channel mediated activity. For example, a “voltage-gated calcium channel associated disorder” includes a disorder, disease or condition which is characterized by a misregulation of a voltage-gated calcium channel mediated activity. As used herein, an “α₂δ-4 associated disorder” includes a disorder, disease or condition which is characterized by a misregulation of an α₂δ-4 mediated activity (e.g, modulation of an α₁ subunit activity and/or calcium channel mediated activity). Voltage-gated calcium channel associated disorders include angina, atrial fibrillation and flutter, hypertension, peripheral vascular disorders (e.g., Raynaud's), and cerebral vasospasm.

[2405] As used herein, an “ion channel mediated activity” includes an activity which involves a calcium channel, e.g., a voltage-regulated calcium channel, in a cell, e.g., in a neuronal cell, a muscular cell, a neuroendocrine cell, or an egg cell associated with receiving, conducting, and transmitting signals, in, for example, a neuron. Ion channel mediated activities include release of neurotransmitters or second messenger molecules (e.g., dopamine or norepinephrine), from cells, e.g., neurons; modulation of resting potential of membranes, wave forms and frequencies of action potentials, and thresholds of excitation; participation in signal transduction pathways, and modulation of processes such as integration of sub-threshold synaptic responses and the conductance of back-propagating action potentials in, for example, muscle cells (e.g., changes in those action potentials resulting in a morphological or differentiative response in the cell).

[2406] As used herein, an “α₂δ-4 mediated activity” includes an activity which involves the regulation of an α₁ and/or any voltage-gated calcium channel activity. α₂δ-4 mediated activities include the interaction with and/or modulation of another non-α₂δ-4 subunit, interaction with and/or modulation of an α₁ calcium channel subunit, modulation of the conductance of an α₁ calcium channel subunit, and interaction with and/or modulation of a non-α₂δ-4 delta subunit.

[2407] The term “family” when referring to the polypeptide and nucleic acid molecules of the invention is intended to mean two or more polypeptides or nucleic acid molecules having a common structural domain or motif and having sufficient amino acid or nucleotide sequence homology as defined herein. Such family members can be naturally or non-naturally occurring and can be from either the same or different species. For example, a family can contain a first polypeptide of human origin, as well as other, distinct polypeptides of human origin or alternatively, can contain homologues of non-human origin, e.g., monkey polypeptides. Members of a family may also have common functional characteristics.

[2408] For example, the family of α₂δ-4 polypeptides comprise at least one “transmembrane domain” and preferably two transmembrane domains. As used herein, the term “transmembrane domain” includes an amino acid sequence of about 18-45 amino acid residues in length which spans the plasma membrane. More preferably, a transmembrane domain includes about at least 20, 25, 30, 35, 40, or 45 amino acid residues and spans the plasma membrane. Transmembrane domains are rich in hydrophobic residues, and typically have an alpha-helical structure. In a preferred embodiment, at least 50%, 60%, 70%, 80%, 90%, 95% or more of the amino acids of a transmembrane domain are hydrophobic, e.g., leucines, isoleucines, alanines, valines, phenylalanines, prolines or methionines. Transmembrane domains are described in, for example, Zagotta W. N. et al, (1996) Annual Rev. Neurosci. 19: 235-263, the contents of which are incorporated herein by reference. Amino acid residues 422-442, and 1048-1066 of the α₂δ-4 polypeptide comprise transmembrane domains. Accordingly, α₂δ-4 polypeptides having at least 50-60% homology, preferably about 60-70%, more preferably about 70-80%, or about 80-90% homology with a transmembrane domain of human α₂δ-4 are within the scope of the invention.

[2409] In a preferred embodiment, the α₂δ-4 molecules of the invention include at least one, preferably two, three, four, five, six, seven, eight, nine, or ten transmembrane domains

[2410] In another embodiment, the α₂δ-4 molecules of the invention are identified based on the presence of a Cache domain in the protein or corresponding nucleic acid molecule. As used herein, the term Cache domain includes a protein domain having an amino acid sequence of about 50-150, preferably about 60-100, more preferably about 70-90 amino acid residues, or about 75, 76, 77, 78, 79, 80, 81, 82, 83, 84, 85 amino acids and having a bit score for the alignment of the sequence to the spectrin family (HMM) of at least 20, preferably 20-30, more preferably 40-45, and even more preferably 50-55, or greater. Preferably, a Cache domain is extracellular, even more preferably, a Chache domain has a small molecule recognition and/or signaling activity (e.g. a ligand, agonist or antagonist recognition activity). At least one cache family HMM has been assigned the PFAM Accession PF02743.

[2411] To identify the presence of a Cache domain in a α₂δ-4 molecule and/or make the determination that a protein of interest has a particular profile, the amino acid sequence of the protein is searched against a database of HMMs (e.g., the Pfam database, release 2.1) using the default parameters (http://www.sanger.ac.uk/Software/Pfam/HMM_search). For example, the hmmsf program, which is available as part of the HMMER package of search programs, is a family specific default program for PF02743 and a score of 15 is the default threshold score for determining a hit. Alternatively, the threshold score for determining a hit can be lowered (e.g., to 8 bits). A description of the Pfam database can be found in Sonhammer et al. (1997) Proteins 28(3)405-420 and a detailed description of HMMs can be found, for example, in Gribskov et al. (1990) Meth. Enzymol. 183:146-159; Gribskov et al.(1987) Proc. Natl. Acad. Sci. USA 84:4355-4358; Krogh et al.(1994) J. Mol. Biol. 235:1501-1531; and Stultz et al.(1993) Protein Sci. 2:305-314, the contents of which are incorporated herein by reference. A search was performed against the HMM database resulting in the identification of Cache domains in the amino acid sequence of SEQ ID NO:44. The results of the search are set forth below.

| Cache: | domain 1 of 2, from 402 to 481: score 39.9, E = 9.4e − 10 | | | |
|---|---|---|---|---|
| | | | *->wTepYvdaastgdlViTvsvPvydrtnetenktnkdngdllGVvgiD | |
| | | | ++P+ d +++l+ Tvs+P y + llG vg+D | |
| | 25658 | 402 | FSLPFSDEM-GDGLIMTVSKPCYF------------GNLLLGIVGVD | 435 |
| | | | vpledLlkltksiklGktGYaFivdnnGkvlaHPnlrpvtkllkdw < -* | |
| | | | v l +l+++ ++ + + Y F++d +G++l HP l ++ l++ + | |
| | 25658 | 436 | VDLAYILEDVTYYQDSLASYTFLIDDKGYTLMHPSLTRPYLLSEPP | 481 |
| Cache: | domain 2 of 2, from 721 to 802: score 10.2, E = 0.2 | | | |
| | | | *->wTePYvdaastgdlViTvsvPvydrtnetenktnkdngdllGVvgiD | |
| | | | +T PY d + + V+T+s + ++t + g V+giD | |
| | 25658 | 721 | LTGPYLDVG-GAGYVVTISHTIHS------SSTQLSSGHTVAVMGID | 760 |
| | | | vpledLlkltksi......klGktGYaFivdnnGkvlaHPnl < -* | |
| | | | +l + k + ++ + +++ G + +Fi+ G+++aHP l | |
| | 25658 | 761 | FTLRYFYKVLMDLlpvcnqDGGNKIRCFIMEDRGYLVAHPTL | 802 |

[2412] All amino acids are described using universal single letter abbreviations according to these motifs.

[2413] Accordingly, in one embodiment, an α₂δ-4 molecule SEQ ID NO:44 includes a Cache domain at about amino acids 402-481 of SEQ ID NO:44, and/or a Cache domain at about 721-802 of SEQ ID NO:44. Such a cache domain has the amino acid sequence:

[2414] FSLPFSDEMGDGLIMTVSKPCYFGNLLLGIVGVDVDLAYILEDV TYYQDSLASYTFLIDDKGYTLMHPSLTRPYLLSEPP

[2415] In another embodiment, α₂δ-4 molecules having at least 50-60% homology, preferably about 60-70%, more preferably about 70-80%, or about 80-90% homology with a cache domain of human SEQ ID NO:44 are within the scope of the invention.

[2416] In yet another embodiment, the α₂δ-4 molecules of the invention are identified based on the presence of a VWA_{—}4 domain in the protein or corresponding nucleic acid molecule. As used herein, the term VWA_{—}4 domain includes a protein domain having an amino acid sequence of about 100-300, preferably about 150-250, more preferably about 175-225 amino acid residues, or about 150-250 amino acids(e.g., 190, 192, 193, 194 of 195 amino acids) and having a bit score for the alignment of the sequence to the spectrin family (HMM) of at least 4, 5, or 6, or greater. The VWA_{—}4 domain HMM can be built using art recognized Markov Modeling software and known VWA_{—}4 protein sequences. Preferably, a VWA domain has a ligand binding activity.

[2417] To identify the presence of a VWA_{—}4 domain in a α₂δ-4 molecule and make the determination that a protein of interest has a particular profile, the amino acid sequence of the protein is searched against a database of HMMs using the appropriate parameters (e.g., a threshold of 5, 8, 10, or 15 bits). A search was performed against a HMM database that contained at least one VWA HMM resulting in the identification of a VWA domain in the amino acid sequence of SEQ ID NO:44. The results of the search are set forth below.

| VWA_4: domain 1 of 1, from 175 to 371: score 6.1, E = 0.12 | | | |
|---|---|---|---|
| | | *-> plDvvfllDgSgSmggnrfekvkefv.klveqid.gdrvglvqFssd | |
| | | + +v++lD +S+++ ++++k++++ +++++d+ d +++++ +++ | |
| 25658 | 175 | SKHIVVILDHGASVTDTQLQIAKDAAqVILSAIDeHDKISVLTVADT | 221 |
| | | vrvefpln..........sqskdallealaslsykglkdyslgggTnlg. | |
| | | vr+ + ++ ++ k ++ + s++ + +T + | |
| 25658 | 222 | VRTCSLDQcyktflspatSETKRKMSTFVSSVKS-------SDSPTQHAv | 264 |
| | | ALqyalenlfsesag.rrgagratkiSnvpkvliliTDGesndg..gddp | |
| | | + q+a++ + +++++ ++ ++ v+i ++ G + ++++d+ | |
| 25658 | 265 | GFQKAFQL-IRSTNNnTKFQANTD------MVIIYLSAGITSKDssEEDK | 307 |
| | | edileaakelkrsg...vkvfvigvgna......de.elkeiasep.geh | |
| | | + +l++++e + +++v++ + ++ n++ ++ + +l+ +a +++g + | |
| 25658 | 308 | KATLQVINEENSFLnnsVMILTYALMNDgvtglkELaFLRDLAEQNsGKY | 357 |
| | | vffdvsdvedlpslldllidlll<-* | |
| | | +p+ ++l + + | |
| 25658 | 358 | G---------VPDRTALPVIKGS | 371 |

[2418] Accordingly, in one embodiment, an α₂δ-4 molecule SEQ ID NO:44 which includes a VWA_{—}4 domain at about amino acids 175-371 of SEQ ID NO:44. Such a VWA_{—}4 domain has the amino acid sequence:

SKHIVVILDHGASVTDTQLQIAKDAAQVILSAIDEHDKISVLTVADTVRT
CSLDQCYKTFLSPATSETKRKMSTFVSSVKSSDSPTQHAVGFQKAFQLIR
STNNNTKFQANTDMVIIYLSAGITSKDSSEEDKKATLQVINEENSFLNNS
VMILTYALMNDGVTGLKELAFLRDLAEQNSGKYGVPDRTALPVIKGS

[2419] In another embodiment, α₂δ-4 molecules having at least 50-60% homology, preferably about 60-70%, more preferably about 70-80%, or about 80-90% homology with a VWA_{—}4 domain profile of human SEQ ID NO:44 are within the scope of the invention.

[2420] Isolated polypeptides of the present invention, preferably α₂δ-4 polypeptides, have an amino acid sequence sufficiently identical to the amino acid sequence of SEQ ID NO:44 or are encoded by a nucleotide sequence sufficiently identical to SEQ ID NO:43 or 45. As used herein, the term “sufficiently identical” refers to a first amino acid or nucleotide sequence which contains a sufficient or minimum number of identical or equivalent (e.g., an amino acid residue which has a similar side chain) amino acid residues or nucleotides to a second amino acid or nucleotide sequence such that the first and second amino acid or nucleotide sequences share common structural domains or motifs and/or a common functional activity. For example, amino acid or nucleotide sequences which share common structural domains having at least 50%, 55%, 60%, 65%, 70%, 75%, 80%, 85%, 85%, 90% 95%, 96%, 97%, 98%, 99% or more homology or identity across the amino acid sequences of the domains and contain at least one and preferably two structural domains or motifs, are defined herein as sufficiently identical. Furthermore, amino acid or nucleotide sequences which share at least 50%, 55%, 60%, 65%, 70%, 75%, 80%, 85%, 85%, 90%, 95%, 96%, 97%, 98%, 99% or more homology or identity and share a common functional activity are defined herein as sufficiently identical.

[2421] In a preferred embodiment, an α₂δ-4 polypeptide includes at least one or more transmembrane domain, and has an amino acid sequence at least about 50%, 55%, 60%, 65%, 70%, 75%, 80%, 85%, 85%, 90%, 95%, 96%, 97%, 98%, 99% or more homologous or identical to the amino acid sequence of SEQ ID NO:44, or the amino acid sequence encoded by the DNA insert of the plasmid deposited with ATCC as Accession Number ______. In yet another preferred embodiment, an α₂δ-4 polypeptide includes at least one or more transmembrane domain, and is encoded by a nucleic acid molecule having a nucleotide sequence which hybridizes under stringent hybridization conditions to a complement of a nucleic acid molecule comprising the nucleotide sequence of SEQ ID NO:43 or 45. In another preferred embodiment, an α₂δ-4 polypeptide includes at least one transmembrane domain, and has an α₂δ-4 activity.

[2422] As used interchangeably herein, an “α₂δ-4 activity”, “biological activity of α₂δ-4” or “functional activity of α₂δ-4”, refers to an activity exerted by an α₂δ-4 polypeptide or nucleic acid molecule, for example, an α₂δ-4 expressing cell or tissue, as determined in vivo, or in vitro, according to standard techniques. In one embodiment, an α₂δ-4 activity is a direct activity, such as an association with an α₂δ-4-target molecule. As used herein, a “target molecule” or “binding partner” is a molecule with which an α₂δ-4 polypeptide binds or interacts in nature, such that α₂δ-4-mediated function is achieved. An α₂δ-4 target molecule can be a non-α₂δ-4 molecule or an α₂δ-4 polypeptide or polypeptide of the present invention. In an exemplary embodiment, an α₂δ-4 target molecule another calcium channel subunit, e.g., a calcium channel α subunit. In another exemplary embodiment, an α₂δ-4 target molecule is a calcium channel ligand such as calcium. The biological activities of α₂δ-4 are described herein. For example, the α₂δ-4 polypeptides of the present invention can have one or more of the following activities: (1) interaction with and/or modulation of another non-α₂δ-4 subunit; (2) interaction with and/or modulation of an α₁ calcium channel subunit; (3) modulation of the conductance of an α₁ calcium channel subunit; (4) interaction with and/or modulation of a non-α₂δ-4 delta subunit; (5) modulation of membrane excitability; (6) influencing the resting potential of membranes; (7) modulation of wave forms and frequencies of action potentials; (8) modulation of thresholds of excitation; (9) modulation of neurite outgrowth and synaptogenesis; (10) modulation of signal transduction; and (7) participation in nociception. Alternatively, an α₂δ-4 activity is an indirect activity, such as a cellular signaling activity mediated by interaction of the α₂δ-4 polypeptide with another calcium channel subunit or a calcium channel ligand.

[2423] Accordingly, another embodiment of the invention features isolated α₂δ-4 polypeptides and polypeptides having an α₂δ-4 activity. Preferred polypeptides are α₂δ-4 polypeptides having at least one or more transmembrane domain, and preferably, an α₂δ-4 activity.

[2424] Additional preferred polypeptides have one or more transmembrane domain, and are, preferably, encoded by a nucleic acid molecule having a nucleotide sequence which hybridizes under stringent hybridization conditions to a complement of a nucleic acid molecule comprising the nucleotide sequence of SEQ ID NO:43 or 45.

[2425] The nucleotide sequence of the isolated human α₂δ-4 cDNA and the predicted amino acid sequence of the human α₂δ-4 polypeptide are shown in FIGS. 41A-D and in SEQ ID NOs:43 and 44, respectively. A plasmid containing the nucleotide sequence encoding human α₂δ-4 was deposited with the American Type Culture Collection (ATCC), 10801 University Boulevard, Manassas, Va. 20110-2209, on ______ and assigned Accession Number ______. This deposit will be maintained under the terms of the Budapest Treaty on the International Recognition of the Deposit of Microorganisms for the Purposes of Patent Procedure. This deposit was made merely as a convenience for those of skill in the art and is not an admission that a deposit is required under 35 U.S.C. §112.

[2426] The human α₂δ-4 gene, which is approximately 5489 nucleotides in length, encodes a polypeptide which is approximately 1223 amino acid residues in length.

[2427] Various aspects of the invention are described in further detail in the following subsections:

[2428] I. Isolated Nucleic Acid Molecules

[2429] One aspect of the invention pertains to isolated nucleic acid molecules that encode α₂δ-4 polypeptides or biologically active portions thereof, as well as nucleic acid fragments sufficient for use as hybridization probes to identify α₂δ-4-encoding nucleic acid molecules (e.g., α₂δ-4 mRNA) and fragments for use as PCR primers for the amplification or mutation of α₂δ-4 nucleic acid molecules. As used herein, the term “nucleic acid molecule” is intended to include DNA molecules (e.g., cDNA or genomic DNA) and RNA molecules (e.g., mRNA) and analogs of the DNA or RNA generated using nucleotide analogs. The nucleic acid molecule can be single-stranded or double-stranded, but preferably is double-stranded DNA.

[2430] The term “isolated nucleic acid molecule” includes nucleic acid molecules which are separated from other nucleic acid molecules which are present in the natural source of the nucleic acid. For example, with regards to genomic DNA, the term “isolated” includes nucleic acid molecules which are separated from the chromosome with which the genomic DNA is naturally associated. Preferably, an “isolated” nucleic acid is free of sequences which naturally flank the nucleic acid (i.e., sequences located at the 5′ and 3′ ends of the nucleic acid) in the genomic DNA of the organism from which the nucleic acid is derived. For example, in various embodiments, the isolated α₂δ-4 nucleic acid molecule can contain less than about 5 kb, 4 kb, 3 kb, 2 kb, 1 kb, 0.5 kb or 0.1 kb of nucleotide sequences which naturally flank the nucleic acid molecule in genomic DNA of the cell from which the nucleic acid is derived. Moreover, an “isolated” nucleic acid molecule, such as a cDNA molecule, can be substantially free of other cellular material, or culture medium when produced by recombinant techniques, or substantially free of chemical precursors or other chemicals when chemically synthesized.

[2431] A nucleic acid molecule of the present invention, e.g., a nucleic acid molecule having the nucleotide sequence of SEQ ID NO:43 or 45, or the nucleotide sequence of the DNA insert of the plasmid deposited with ATCC as Accession Number ______, or a portion thereof, can be isolated using standard molecular biology techniques and the sequence information provided herein. Using all or a portion of the nucleic acid sequence of SEQ ID NO:43 or 45, or the nucleotide sequence of the DNA insert of the plasmid deposited with ATCC as Accession Number ______, as a hybridization probe, α₂δ-4 nucleic acid molecules can be isolated using standard hybridization and cloning techniques (e.g., as described in Sambrook, J., Fritsh, E. F., and Maniatis, T. Molecular Cloning: A Laboratory Manual. 2nd, ed., Cold Spring Harbor Laboratory, Cold Spring Harbor Laboratory Press, Cold Spring Harbor, N.Y., 1989).

[2432] Moreover, a nucleic acid molecule encompassing all or a portion of SEQ ID NO:43 or 45, or the nucleotide sequence of the DNA insert of the plasmid deposited with ATCC as Accession Number ______ can be isolated by the polymerase chain reaction (PCR) using synthetic oligonucleotide primers designed based upon the sequence of SEQ ID NO:43 or 45, or the nucleotide sequence of the DNA insert of the plasmid deposited with ATCC as Accession Number ______.

[2433] A nucleic acid of the invention can be amplified using cDNA, mRNA or alternatively, genomic DNA, as a template and appropriate oligonucleotide primers according to standard PCR amplification techniques. The nucleic acid so amplified can be cloned into an appropriate vector and characterized by DNA sequence analysis. Furthermore, oligonucleotides corresponding to α₂δ-4 nucleotide sequences can be prepared by standard synthetic techniques, e.g., using an automated DNA synthesizer.

[2434] In one embodiment, an isolated nucleic acid molecule of the invention comprises the nucleotide sequence shown in SEQ ID NO:43. The sequence of SEQ ID NO:43 corresponds to the human α₂δ-4 cDNA. This cDNA comprises sequences encoding the human α₂δ-4 polypeptide (i.e., “the coding region”, from nucleotides 117-3789) as well as 5′ untranslated sequences (nucleotides 1-116) and 3′ untranslated sequences (nucleotides 3790-5489). Alternatively, the nucleic acid molecule can comprise only the coding region of SEQ ID NO:43 (e.g., nucleotides 117-3789, corresponding to SEQ ID NO:45). Accordingly, in another embodiment, the isolated nucleic acid molecule comprises SEQ ID NO:45 and nucleotides 1-116 and 3790-5489 of SEQ ID NO:43. In yet another embodiment, the nucleic acid molecule consists of the nucleotide sequence set forth as SEQ ID NO:43 or 45.

[2435] In still another embodiment, an isolated nucleic acid molecule of the invention comprises a nucleic acid molecule which is a complement of the nucleotide sequence shown in SEQ ID NO:43 or 45, or the nucleotide sequence of the DNA insert of the plasmid deposited with ATCC as Accession Number ______, or a portion of any of these nucleotide sequences. A nucleic acid molecule which is complementary to the nucleotide sequence shown in SEQ ID NO:43 or 45, or the nucleotide sequence of the DNA insert of the plasmid deposited with ATCC as Accession Number ______, is one which is sufficiently complementary to the nucleotide sequence shown in SEQ ID NO:43 or 45, or the nucleotide sequence of the DNA insert of the plasmid deposited with ATCC as Accession Number ______, such that it can hybridize to the nucleotide sequence shown in SEQ ID NO:43 or 45, or the nucleotide sequence of the DNA insert of the plasmid deposited with ATCC as Accession Number ______, thereby forming a stable duplex.

[2436] In still another preferred embodiment, an isolated nucleic acid molecule of the present invention comprises a nucleotide sequence which is at least about 50%, 55%, 60%, 65%, 70%, 75%, 80%, 85%, 90%, 95%, 96%, 97%, 98%, 99% or more identical to the nucleotide sequence shown in SEQ ID NO:43 or 45 (e.g., to the entire length of the nucleotide sequence), or to the nucleotide sequence (e.g., the entire length of the nucleotide sequence) of the DNA insert of the plasmid deposited with ATCC as Accession Number ______, or a portion of any of these nucleotide sequences. In one embodiment, a nucleic acid molecule of the present invention comprises a nucleotide sequence which is at least (or no greater than) 50-100, 100-250, 250-500, 500-750, 750-1000, 1000-1250, 1250-1500, 1500-1700, 1700-2000, 2000-2500, 2500-3000, 3000-3500, 3500-4000, 4000-4500, 4500-5000 or more nucleotides in length and hybridizes under stringent hybridization conditions to a complement of a nucleic acid molecule of SEQ ID NO:43 or 45, or the nucleotide sequence of the DNA insert of the plasmid deposited with ATCC as Accession Number ______.

[2437] Moreover, the nucleic acid molecule of the invention can comprise only a portion of the nucleic acid sequence of SEQ ID NO:43 or 45, or the nucleotide sequence of the DNA insert of the plasmid deposited with ATCC as Accession Number ______, for example, a fragment which can be used as a probe or primer or a fragment encoding a portion of an α₂δ-4 polypeptide, e.g., a biologically active portion of an α₂δ-4 polypeptide. The nucleotide sequence determined from the cloning of the α₂δ-4 gene allows for the generation of probes and primers designed for use in identifying and/or cloning other α₂δ-4 family members, as well as α₂δ-4 homologues from other species. The probe/primer typically comprises substantially purified oligonucleotide. The probe/primer (e.g., oligonucleotide) typically comprises a region of nucleotide sequence that hybridizes under stringent conditions to at least about 12 or 15, preferably about 20 or 25, more preferably about 30, 35, 40, 45, 50, 55, 60, 65, 75, 80, 85, 90, 95, or 100 or more consecutive nucleotides of a sense sequence of SEQ ID NO:43 or 45, or the nucleotide sequence of the DNA insert of the plasmid deposited with ATCC as Accession Number ______, of an antisense sequence of SEQ ID NO:43 or 45, or the nucleotide sequence of the DNA insert of the plasmid deposited with ATCC as Accession Number ______, or of a naturally occurring allelic variant or mutant of SEQ ID NO:43 or 45, or the nucleotide sequence of the DNA insert of the plasmid deposited with ATCC as Accession Number ______.

[2438] Exemplary probes or primers are at least (or no greater than)12 or 15, 20 or 25, 30, 35, 40, 45, 50, 55, 60, 65, 70, 75 or more nucleotides in length and/or comprise consecutive nucleotides of an isolated nucleic acid molecule described herein. Also included within the scope of the present invention are probes or primers comprising contiguous or consecutive nucleotides of an isolated nucleic acid molecule described herein, but for the difference of 1, 2, 3, 4, 5, 6, 7, 8, 9 or 10 bases within the probe or primer sequence. Probes based on the α₂δ-4 nucleotide sequences can be used to detect (e.g., specifically detect) transcripts or genomic sequences encoding the same or homologous polypeptides. In preferred embodiments, the probe further comprises a label group attached thereto, e.g., the label group can be a radioisotope, a fluorescent compound, an enzyme, or an enzyme co-factor. In another embodiment a set of primers is provided, e.g., primers suitable for use in a PCR, which can be used to amplify a selected region of an α₂δ-4 sequence, e.g., a domain, region, site or other sequence described herein. The primers should be at least 5, 10, or 50 base pairs in length and less than 100, or less than 200, base pairs in length. The primers should be identical, or differs by no greater than 1, 2, 3, 4, 5, 6, 7, 8, 9 or 10 bases when compared to a sequence disclosed herein or to the sequence of a naturally occurring variant. Such probes can be used as a part of a diagnostic test kit for identifying cells or tissue which misexpress an α₂δ-4 polypeptide, such as by measuring a level of an α₂δ-4-encoding nucleic acid in a sample of cells from a subject e.g., detecting α₂δ-4 mRNA levels or determining whether a genomic α₂δ-4 gene has been mutated or deleted.

[2439] A nucleic acid fragment encoding a “biologically active portion of an α₂δ-4 polypeptide” can be prepared by isolating a portion of the nucleotide sequence of SEQ ID NO:43 or 45, or the nucleotide sequence of the DNA insert of the plasmid deposited with ATCC as Accession Number ______, which encodes a polypeptide having an α₂δ-4 biological activity (the biological activities of the α₂δ-4 polypeptides are described herein), expressing the encoded portion of the α₂δ-4 polypeptide (e.g., by recombinant expression in vitro) and assessing the activity of the encoded portion of the α₂δ-4 polypeptide. In an exemplary embodiment, the nucleic acid molecule is at least 50-100, 100-250, 250-500, 500-700, 750-1000, 1000-1250, 1250-1500, 1500-1700, 1700-2000, 2000-2500, 2500-3000, 3000-3500, 3500-4000, 4000-4500, 4500-5000 or more nucleotides in length and encodes a polypeptide having an α₂δ-4 activity (as described herein).

[2440] The invention further encompasses nucleic acid molecules that differ from the nucleotide sequence shown in SEQ ID NO:43 or 45, or the nucleotide sequence of the DNA insert of the plasmid deposited with ATCC as Accession Number ______. Such differences can be due to due to degeneracy of the genetic code, thus resulting in a nucleic acid which encodes the same α₂δ-4 polypeptides as those encoded by the nucleotide sequence shown in SEQ ID NO:43 or 45, or the nucleotide sequence of the DNA insert of the plasmid deposited with ATCC as Accession Number ______. In another embodiment, an isolated nucleic acid molecule of the invention has a nucleotide sequence encoding a polypeptide having an amino acid sequence which differs by at least 1, but no greater than 5, 10, 20, 50 or 100 amino acid residues from the amino acid sequence shown in SEQ ID NO:44, or the amino acid sequence encoded by the DNA insert of the plasmid deposited with the ATCC as Accession Number ______. In yet another embodiment, the nucleic acid molecule encodes the amino acid sequence of human α₂δ-4. If an alignment is needed for this comparison, the sequences should be aligned for maximum homology.

[2441] Nucleic acid variants can be naturally occurring, such as allelic variants (same locus), homologues (different locus), and orthologues (different organism) or can be non naturally occurring. Non-naturally occurring variants can be made by mutagenesis techniques, including those applied to polynucleotides, cells, or organisms. The variants can contain nucleotide substitutions, deletions, inversions and insertions. Variation can occur in either or both the coding and non-coding regions. The variations can produce both conservative and non-conservative amino acid substitutions (as compared in the encoded product).

[2442] Allelic variants result, for example, from DNA sequence polymorphisms within a population (e.g., the human population) that lead to changes in the amino acid sequences of the α₂δ-4 polypeptides. Such genetic polymorphism in the α₂δ-4 genes may exist among individuals within a population due to natural allelic variation. As used herein, the terms “gene” and “recombinant gene” refer to nucleic acid molecules which include an open reading frame encoding an α₂δ-4 polypeptide, preferably a mammalian α₂δ-4 polypeptide, and can further include non-coding regulatory sequences, and introns.

[2443] Accordingly, in one embodiment, the invention features isolated nucleic acid molecules which encode a naturally occurring allelic variant of a polypeptide comprising the amino acid sequence of SEQ ID NO:44, or an amino acid sequence encoded by the DNA insert of the plasmid deposited with ATCC as Accession Number ______, wherein the nucleic acid molecule hybridizes to a complement of a nucleic acid molecule comprising SEQ ID NO:43 or 45, for example, under stringent hybridization conditions.

[2444] Allelic variants of human α₂δ-4 include both functional and non-functional α₂δ-4 polypeptides. Functional allelic variants are naturally occurring amino acid sequence variants of the human α₂δ-4 polypeptide that maintain the ability to bind an α₂δ-4 ligand or substrate and/or modulate membrane excitability or signal transduction. Functional allelic variants will typically contain only conservative substitution of one or more amino acids of SEQ ID NO:44, or substitution, deletion or insertion of non-critical residues in non-critical regions of the polypeptide.

[2445] Non-functional allelic variants are naturally occurring amino acid sequence variants of the human α₂δ-4 polypeptide that do not have the ability to form functional calcium channels or to modulate membrane excitability. Non-functional allelic variants will typically contain a non-conservative substitution, a deletion, or insertion or premature truncation of the amino acid sequence of SEQ ID NO:44, or a substitution, insertion or deletion in critical residues or critical regions.

[2446] The present invention further provides non-human and non-murine orthologues (e.g., non-human orthologues of the human α₂δ-4 polypeptide). Orthologues of the human α₂δ-4 polypeptides are polypeptides that are isolated from non-human organisms and possess the same α₂δ-4 ligand binding and/or modulation of membrane excitation mechanisms of the human α₂δ-4 polypeptide. Orthologues of the human α₂δ-4 polypeptide can readily be identified as comprising an amino acid sequence that is substantially identical to SEQ ID NO:44.

[2447] Moreover, nucleic acid molecules encoding other α₂δ-4 family members and, thus, which have a nucleotide sequence which differs from the α₂δ-4 sequences of SEQ ID NO:43 or 45, or the nucleotide sequence of the DNA insert of the plasmid deposited with ATCC as Accession Number ______ are intended to be within the scope of the invention. For example, another α₂δ-4 cDNA can be identified based on the nucleotide sequence of human α₂δ-4. Moreover, nucleic acid molecules encoding α₂δ-4 polypeptides from different species, and which, thus, have a nucleotide sequence which differs from the α₂δ-4 sequences of SEQ ID NO:43 or 45, or the nucleotide sequence of the DNA insert of the plasmid deposited with ATCC as Accession Number ______ are intended to be within the scope of the invention. For example, a mouse α₂δ-4 cDNA can be identified based on the nucleotide sequence of a human α₂δ-4.

[2448] Nucleic acid molecules corresponding to natural allelic variants and homologues of the α₂δ-4 cDNAs of the invention can be isolated based on their homology to the α₂δ-4 nucleic acids disclosed herein using the cDNAs disclosed herein, or a portion thereof, as a hybridization probe according to standard hybridization techniques under stringent hybridization conditions. Nucleic acid molecules corresponding to natural allelic variants and homologues of the α₂δ-4 cDNAs of the invention can further be isolated by mapping to the same chromosome or locus as the α₂δ-4 gene.

[2449] Orthologues, homologues and allelic variants can be identified using methods known in the art (e.g., by hybridization to an isolated nucleic acid molecule of the present invention, for example, under stringent hybridization conditions). In one embodiment, an isolated nucleic acid molecule of the invention is at least 15, 20, 25, 30 or more nucleotides in length and hybridizes under stringent conditions to the nucleic acid molecule comprising the nucleotide sequence of SEQ ID NO:43 or 45, or the nucleotide sequence of the DNA insert of the plasmid deposited with ATCC as Accession Number ______. In other embodiment, the nucleic acid is at least 100, 100-150, 150-200, 200-250, 250-300, 300-350, 350-400, 400-450, 450-500, 500-550, 550-600, 600-650, 650-700, 700-750, 750-800, 800-850, 850-900, 900-950, 950-1000, 1000-1050, 1050-1070, 1070-1100, 1100-1150, 1150-1200, 1200-1250, 1250-1300, 1300-1350, 1350-1400, 1400-1450, 1450-1500, 1500-1550, 1550-1600, 1600-1650, 1650-1700, 1700-1750, 1750-1800, 1800-2000, 2000-2500, 2500-3000, 3000-3500, 3500-4000, 4000-4500, 4500-5000 or more nucleotides in length.

[2450] As used herein, the term “hybridizes under stringent conditions” is intended to describe conditions for hybridization and washing under which nucleotide sequences that are significantly identical or homologous to each other remain hybridized to each other. Preferably, the conditions are such that sequences at least about 70%, more preferably at least about 80%, even more preferably at least about 85% or 90% identical to each other remain hybridized to each other. Such stringent conditions are known to those skilled in the art and can be found in Current Protocols in Molecular Biology, Ausubel et al., eds., John Wiley & Sons, Inc. (1995), sections 2, 4 and 6. Additional stringent conditions can be found in Molecular Cloning: A Laboratory Manual, Sambrook et al., Cold Spring Harbor Press, Cold Spring Harbor, N.Y. (1989), chapters 7, 9 and 11. A preferred, non-limiting example of stringent hybridization conditions includes hybridization in 4×sodium chloride/sodium citrate (SSC), at about 65-70° C. (or hybridization in 4×SSC plus 50% formamide at about 42-50° C.) followed by one or more washes in 1×SSC, at about 65-70° C. A preferred, non-limiting example of highly stringent hybridization conditions includes hybridization in 1×SSC, at about 65-70° C. (or hybridization in 1×SSC plus 50% formamide at about 42-50° C.) followed by one or more washes in 0.3×SSC, at about 65-70° C. A preferred, non-limiting example of reduced stringency hybridization conditions includes hybridization in 4×SSC, at about 50-60° C. (or alternatively hybridization in 6×SSC plus 50% formamide at about 40-45° C.) followed by one or more washes in 2×SSC, at about 50-60° C. Ranges intermediate to the above-recited values, e.g., at 65-70° C. or at 42-50° C. are also intended to be encompassed by the present invention. SSPE (1×SSPE is 0.15M NaCl, 10 mM NaH₂PO₄, and 1.25 mM EDTA, pH 7.4) can be substituted for SSC (1×SSC is 0.15M NaCl and 15 mM sodium citrate) in the hybridization and wash buffers; washes are performed for 15 minutes each after hybridization is complete. The hybridization temperature for hybrids anticipated to be less than 50 base pairs in length should be 5-10° C. less than the melting temperature (Tₘ) of the hybrid, where Tₘ is determined according to the following equations. For hybrids less than 18 base pairs in length, Tₘ(° C.)=2(# of A+T bases)+4(# of G+C bases). For hybrids between 18 and 49 base pairs in length, Tₘ(° C.)=81.5+16.6(log₁₀[Na⁺])+0.41(%G+C)−(600/N), where N is the number of bases in the hybrid, and [Na⁺] is the concentration of sodium ions in the hybridization buffer ([Na⁺] for 1×SSC=0.165 M). It will also be recognized by the skilled practitioner that additional reagents may be added to hybridization and/or wash buffers to decrease non-specific hybridization of nucleic acid molecules to membranes, for example, nitrocellulose or nylon membranes, including but not limited to blocking agents (e.g., BSA or salmon or herring sperm carrier DNA), detergents (e.g., SDS), chelating agents (e.g., EDTA), Ficoll, PVP and the like. When using nylon membranes, in particular, an additional preferred, non-limiting example of stringent hybridization conditions is hybridization in 0.25-0.5M NaH₂PO₄, 7% SDS at about 65° C., followed by one or more washes at 0.02M NaH₂PO₄, 1% SDS at 65° C., see e.g, Church and Gilbert (1984) Proc. Natl. Acad. Sci. USA 81:1991-1995, (or alternatively 0.2×SSC, 1% SDS).

[2451] Preferably, an isolated nucleic acid molecule of the invention that hybridizes under stringent conditions to the sequence of SEQ ID NO:43 or 45 and corresponds to a naturally-occurring nucleic acid molecule. As used herein, a “naturally-occurring” nucleic acid molecule refers to an RNA or DNA molecule having a nucleotide sequence that occurs in nature (e.g., encodes a natural polypeptide).

[2452] In addition to naturally-occurring allelic variants of the α₂δ-4 sequences that may exist in the population, the skilled artisan will further appreciate that changes can be introduced by mutation into the nucleotide sequences of SEQ ID NO:43 or 45, or the nucleotide sequence of the DNA insert of the plasmid deposited with ATCC as Accession Number ______, thereby leading to changes in the amino acid sequence of the encoded α₂δ-4 polypeptides, without altering the functional ability of the α₂δ-4 polypeptides. For example, nucleotide substitutions leading to amino acid substitutions at “non-essential” amino acid residues can be made in the sequence of SEQ ID NO:43 or 45, or the nucleotide sequence of the DNA insert of the plasmid deposited with ATCC as Accession Number ______. A “non-essential” amino acid residue is a residue that can be altered from the wild-type sequence of α₂δ-4 (e.g., the sequence of SEQ ID NO:44) without altering the biological activity, whereas an “essential” amino acid residue is required for biological activity. For example, amino acid residues that are conserved among the α₂δ-4 polypeptides of the present invention, e.g, those present in a transmembrane domain, are predicted to be particularly unamenable to alteration. Furthermore, additional amino acid residues that are conserved between the α₂δ-4 polypeptides of the present invention and other members of the α₂δ-4 family are not likely to be amenable to alteration.

[2453] Accordingly, another aspect of the invention pertains to nucleic acid molecules encoding α₂δ-4 polypeptides that contain changes in amino acid residues that are not essential for activity. Such α₂δ-4 polypeptides differ in amino acid sequence from SEQ ID NO:44, yet retain biological activity. In one embodiment, the isolated nucleic acid molecule comprises a nucleotide sequence encoding a polypeptide, wherein the polypeptide comprises an amino acid sequence at least about 50%, 55%, 60%, 65%, 70%, 75%, 80%, 85%, 90%, 95%, 96%, 97%, 98%, 99% or more identical to SEQ ID NO:44 (e.g., to the entire length of SEQ ID NO:44).

[2454] An isolated nucleic acid molecule encoding an α₂δ-4 polypeptide identical to the polypeptide of SEQ ID NO:44, can be created by introducing one or more nucleotide substitutions, additions or deletions into the nucleotide sequence of SEQ ID NO:43 or 45, or the nucleotide sequence of the DNA insert of the plasmid deposited with ATCC as Accession Number ______, such that one or more amino acid substitutions, additions or deletions are introduced into the encoded polypeptide. Mutations can be introduced into SEQ ID NO:43 or 45, or the nucleotide sequence of the DNA insert of the plasmid deposited with ATCC as Accession Number ______ by standard techniques, such as site-directed mutagenesis and PCR-mediated mutagenesis. Preferably, conservative amino acid substitutions are made at one or more predicted non-essential amino acid residues. A “conservative amino acid substitution”is one in which the amino acid residue is replaced with an amino acid residue having a similar side chain. Families of amino acid residues having similar side chains have been defined in the art. These families include amino acids with basic side chains (e.g., lysine, arginine, histidine), acidic side chains (e.g., aspartic acid, glutamic acid), uncharged polar side chains (e.g., glycine, asparagine, glutamine, serine, threonine, tyrosine, cysteine, tryptophan), nonpolar side chains (e.g., alanine, valine, leucine, isoleucine, proline, phenylalanine, methionine), beta-branched side chains (e.g., threonine, valine, isoleucine) and aromatic side chains (e.g., tyrosine, phenylalanine, tryptophan, histidine). Thus, a predicted nonessential amino acid residue in an α₂δ-4 polypeptide is preferably replaced with another amino acid residue from the same side chain family. Alternatively, in another embodiment, mutations can be introduced randomly along all or part of an α₂δ-4 coding sequence, such as by saturation mutagenesis, and the resultant mutants can be screened for α₂δ-4 biological activity to identify mutants that retain activity. Following mutagenesis of SEQ ID NO:43 or 45, or the nucleotide sequence of the DNA insert of the plasmid deposited with ATCC as Accession Number ______, the encoded polypeptide can be expressed recombinantly and the activity of the polypeptide can be determined.

[2455] In a preferred embodiment, a mutant α₂δ-4 polypeptide can be assayed for the ability to (1) interact with and/or modulate another non-α₂δ-4 subunit; (2) interact with and/or modulate an α₁ calcium channel subunit; (3) modulate the conductance of an α₁ calcium channel subunit; (4) interact with and/or modulate a non-α₂δ-4 delta subunit; (5) modulate membrane excitability; (6) influence the resting potential of membranes; (7) modulate wave forms and frequencies of action potentials; (8) modulate thresholds of excitation; (9) modulate of neurite outgrowth and synaptogenesis; (10) modulate signal transduction; and (7) participate in nociception..

[2456] In addition to the nucleic acid molecules encoding α₂δ-4 polypeptides described above, another aspect of the invention pertains to isolated nucleic acid molecules which are antisense thereto. In an exemplary embodiment, the invention provides an isolated nucleic acid molecule which is antisense to an α₂δ-4 nucleic acid molecule (e.g., is antisense to the coding strand of an α₂δ-4 nucleic acid molecule). An “antisense” nucleic acid comprises a nucleotide sequence which is complementary to a “sense”nucleic acid encoding a polypeptide, e.g, complementary to the coding strand of a double-stranded cDNA molecule or complementary to an mRNA sequence. Accordingly, an antisense nucleic acid can hydrogen bond to a sense nucleic acid. The antisense nucleic acid can be complementary to an entire α₂δ-4 coding strand, or to only a portion thereof. In one embodiment, an antisense nucleic acid molecule is antisense to a “coding region” of the coding strand of a nucleotide sequence encoding α₂δ-4. The term “coding region” refers to the region of the nucleotide sequence comprising codons which are translated into amino acid residues (e.g., the coding region of human α₂δ-4 corresponds to SEQ ID NO:3). In another embodiment, the antisense nucleic acid molecule is antisense to a “noncoding region” of the coding strand of a nucleotide sequence encoding α₂δ-4. The term “noncoding region” refers to 5′ and 3′ sequences which flank the coding region that are not translated into amino acids (i.e., also referred to as 5′ and 3′ untranslated regions).

[2457] Given the coding strand sequences encoding α₂δ-4 disclosed herein (e.g., SEQ ID NO:3), antisense nucleic acids of the invention can be designed according to the rules of Watson and Crick base pairing. The antisense nucleic acid molecule can be complementary to the entire coding region of α₂δ-4 mRNA, but more preferably is an oligonucleotide which is antisense to only a portion of the coding or noncoding region of α₂δ-4 mRNA. For example, the antisense oligonucleotide can be complementary to the region surrounding the translation start site of α₂δ-4 mRNA (e.g., between the −10 and +10 regions of the start site of a gene nucleotide sequence). An antisense oligonucleotide can be, for example, about 5, 10, 15, 20, 25, 30, 35, 40, 45 or 50 nucleotides in length. An antisense nucleic acid of the invention can be constructed using chemical synthesis and enzymatic ligation reactions using procedures known in the art. For example, an antisense nucleic acid (e.g., an antisense oligonucleotide) can be chemically synthesized using naturally occurring nucleotides or variously modified nucleotides designed to increase the biological stability of the molecules or to increase the physical stability of the duplex formed between the antisense and sense nucleic acids, e.g., phosphorothioate derivatives and acridine substituted nucleotides can be used. Examples of modified nucleotides which can be used to generate the antisense nucleic acid include 5-fluorouracil, 5-bromouracil, 5-chlorouracil, 5-iodouracil, hypoxanthine, xantine, 4-acetylcytosine, 5-(carboxyhydroxylmethyl) uracil, 5-carboxymethylaminomethyl-2-thiouridine, 5-carboxymethylaminomethyluracil, dihydrouracil, beta-D-galactosylqueosine, inosine, N6-isopentenyladenine, 1-methylguanine, 1-methylinosine, 2,2-dimethylguanine, 2-methyladenine, 2-methylguanine, 3-methylcytosine, 5-methylcytosine, N6-adenine, 7-methylguanine, 5-methylaminomethyluracil, 5-methoxyaminomethyl-2-thiouracil, beta-D-mannosylqueosine, 5′-methoxycarboxymethyluracil, 5-methoxyuracil, 2-methylthio-N6-isopentenyladenine, uracil-5-oxyacetic acid (v), wybutoxosine, pseudouracil, queosine, 2-thiocytosine, 5-methyl-2-thiouracil, 2-thiouracil, 4-thiouracil, 5-methyluracil, uracil-5-oxyacetic acid methylester, uracil-5-oxyacetic acid (v), 5-methyl-2-thiouracil, 3-(3-amino-3-N-2-carboxypropyl) uracil, (acp3)w, and 2,6-diaminopurine. Alternatively, the antisense nucleic acid can be produced biologically using an expression vector into which a nucleic acid has been subcloned in an antisense orientation (i.e., RNA transcribed from the inserted nucleic acid will be of an antisense orientation to a target nucleic acid of interest, described further in the following subsection).

[2458] The antisense nucleic acid molecules of the invention are typically administered to a subject or generated in situ such that they hybridize with or bind to cellular mRNA and/or genomic DNA encoding an α₂δ-4 polypeptide to thereby inhibit expression of the polypeptide, e.g., by inhibiting transcription and/or translation. The hybridization can be by conventional nucleotide complementarity to form a stable duplex, or, for example, in the case of an antisense nucleic acid molecule which binds to DNA duplexes, through specific interactions in the major groove of the double helix. An example of a route of administration of antisense nucleic acid molecules of the invention include direct injection at a tissue site. Alternatively, antisense nucleic acid molecules can be modified to target selected cells and then administered systemically. For example, for systemic administration, antisense molecules can be modified such that they specifically bind to receptors or antigens expressed on a selected cell surface, e.g., by linking the antisense nucleic acid molecules to peptides or antibodies which bind to cell surface receptors or antigens. The antisense nucleic acid molecules can also be delivered to cells using the vectors described herein. To achieve sufficient intracellular concentrations of the antisense molecules, vector constructs in which the antisense nucleic acid molecule is placed under the control of a strong pol II or pol III promoter are preferred.

[2459] In yet another embodiment, the antisense nucleic acid molecule of the invention is an α-anomeric nucleic acid molecule. An α-anomeric nucleic acid molecule forms specific double-stranded hybrids with complementary RNA in which, contrary to the usual β-units, the strands run parallel to each other (Gaultier et al. (1987) Nucleic Acids. Res. 15:6625-6641). The antisense nucleic acid molecule can also comprise a 2′-o-methylribonucleotide (Inoue et al. (1987) Nucleic Acids Res. 15:6131-6148) or a chimeric RNA-DNA analogue (Inoue et al. (1987) FEBS Lett. 215:327-330).

[2460] In still another embodiment, an antisense nucleic acid of the invention is a ribozyme. Ribozymes are catalytic RNA molecules with ribonuclease activity which are capable of cleaving a single-stranded nucleic acid, such as an mRNA, to which they have a complementary region. Thus, ribozymes (e.g., hammerhead ribozymes (described in Haseloff and Gerlach (1988) Nature 334:585-591)) can be used to catalytically cleave α₂δ-4 mRNA transcripts to thereby inhibit translation of α₂δ-4 mRNA. A ribozyme having specificity for an α₂δ-4-encoding nucleic acid can be designed based upon the nucleotide sequence of an α₂δ-4 cDNA disclosed herein (i.e., SEQ ID NO:43 or 45, or the nucleotide sequence of the DNA insert of the plasmid deposited with ATCC as Accession Number ______). For example, a derivative of a Tetrahymena L-19 IVS RNA can be constructed in which the nucleotide sequence of the active site is complementary to the nucleotide sequence to be cleaved in an α₂δ-4-encoding mRNA. See, e.g., Cech et al. U.S. Pat. No. 4,987,071; and Cech et al. U.S. Pat. No. 5,116,742. Alternatively, α₂δ-4 mRNA can be used to select a catalytic RNA having a specific ribonuclease activity from a pool of RNA molecules. See, e.g., Bartel, D. and Szostak, J. W. (1993) Science 261:1411-1418.

[2461] Alternatively, α₂δ-4 gene expression can be inhibited by targeting nucleotide sequences complementary to the regulatory region of the α₂δ-4 (e.g., the α₂δ-4 promoter and/or enhancers) to form triple helical structures that prevent transcription of the α₂δ-4 gene in target cells. See generally, Helene, C. (1991) Anticancer Drug Des. 6(6):569-84; Helene, C. et al. (1992) Ann. N.Y. Acad. Sci. 660:27-36; and Maher, L. J. (1992) Bioassays 14(12):807-15.

[2462] In yet another embodiment, the α₂δ-4 nucleic acid molecules of the present invention can be modified at the base moiety, sugar moiety or phosphate backbone to improve, e.g., the stability, hybridization, or solubility of the molecule. For example, the deoxyribose phosphate backbone of the nucleic acid molecules can be modified to generate peptide nucleic acids (see Hyrup B. et al. (1996) Bioorganic & Medicinal Chemistry 4 (1): 5-23). As used herein, the terms “peptide nucleic acids” or “PNAs” refer to nucleic acid mimics, e.g., DNA mimics, in which the deoxyribose phosphate backbone is replaced by a pseudopeptide backbone and only the four natural nucleobases are retained. The neutral backbone of PNAs has been shown to allow for specific hybridization to DNA and RNA under conditions of low ionic strength. The synthesis of PNA oligomers can be performed using standard solid phase peptide synthesis protocols as described in Hyrup B. et al. (1996) supra; Perry-O'Keefe et al. Proc. Natl. Acad. Sci. 93: 14670-675.

[2463] PNAs of α₂δ-4 nucleic acid molecules can be used in therapeutic and diagnostic applications. For example, PNAs can be used as antisense or antigene agents for sequence-specific modulation of gene expression by, for example, inducing transcription or translation arrest or inhibiting replication. PNAs of α₂δ-4 nucleic acid molecules can also be used in the analysis of single base pair mutations in a gene, (e.g., by PNA-directed PCR clamping); as ‘artificial restriction enzymes’ when used in combination with other enzymes, (e.g., S1 nucleases (Hyrup B. (1996) supra)); or as probes or primers for DNA sequencing or hybridization (Hyrup B. et al. (1996) supra; Perry-O'Keefe supra).

[2464] In another embodiment, PNAs of α₂δ-4 can be modified, (e.g., to enhance their stability or cellular uptake), by attaching lipophilic or other helper groups to PNA, by the formation of PNA-DNA chimeras, or by the use of liposomes or other techniques of drug delivery known in the art. For example, PNA-DNA chimeras of α₂δ-4 nucleic acid molecules can be generated which may combine the advantageous properties of PNA and DNA. Such chimeras allow DNA recognition enzymes, (e.g., RNase H and DNA polymerases), to interact with the DNA portion while the PNA portion would provide high binding affinity and specificity. PNA-DNA chimeras can be linked using linkers of appropriate lengths selected in terms of base stacking, number of bonds between the nucleobases, and orientation (Hyrup B. (1996) supra). The synthesis of PNA-DNA chimeras can be performed as described in Hyrup B. (1996) supra and Finn P. J. et al. (1996) Nucleic Acids Res. 24 (17): 3357-63. For example, a DNA chain can be synthesized on a solid support using standard phosphoramidite coupling chemistry and modified nucleoside analogs, e.g., 5′-(4-methoxytrityl)amino-5′-deoxy-thymidine phosphoramidite, can be used as a between the PNA and the 5′ end of DNA (Mag, M. et al. (1989) Nucleic Acid Res. 17: 5973-88). PNA monomers are then coupled in a stepwise manner to produce a chimeric molecule with a 5′ PNA segment and a 3′ DNA segment (Finn P. J. et al. (1996) supra). Alternatively, chimeric molecules can be synthesized with a 5′ DNA segment and a 3′ PNA segment (Peterser, K. H. et al. (1975) Bioorganic Med. Chem. Lett. 5: 1119-11124).

[2465] In other embodiments, the oligonucleotide may include other appended groups such as peptides (e.g., for targeting host cell receptors in vivo), or agents facilitating transport across the cell membrane (see, e.g., Letsinger et al. (1989) Proc. Natl. Acad. Sci. USA 86:6553-6556; Lemaitre et al. (1987) Proc. Natl. Acad. Sci. USA 84:648-652; PCT Publication No. W088/09810) or the blood-brain barrier (see, e.g., PCT Publication No. W089/10134). In addition, oligonucleotides can be modified with hybridization-triggered cleavage agents (See, e.g., Krol et al. (1988) Bio-Techniques 6:958-976) or intercalating agents. (See, e.g., Zon (1988) Pharm. Res. 5:539-549). To this end, the oligonucleotide may be conjugated to another molecule, (e.g., a peptide, hybridization triggered cross-linking agent, transport agent, or hybridization-triggered cleavage agent).

[2466] Alternatively, the expression characteristics of an endogenous α₂δ-4 gene within a cell line or microorganism may be modified by inserting a heterologous DNA regulatory element into the genome of a stable cell line or cloned microorganism such that the inserted regulatory element is operatively linked with the endogenous α₂δ-4 gene. For example, an endogenous α₂δ-4 gene which is normally “transcriptionally silent”, i.e., an α₂δ-4 gene which is normally not expressed, or is expressed only at very low levels in a cell line or microorganism, may be activated by inserting a regulatory element which is capable of promoting the expression of a normally expressed gene product in that cell line or microorganism. Alternatively, a transcriptionally silent, endogenous α₂δ-4 gene may be activated by insertion of a promiscuous regulatory element that works across cell types.

[2467] A heterologous regulatory element may be inserted into a stable cell line or cloned microorganism, such that it is operatively linked with an endogenous α₂δ-4 gene, using techniques, such as targeted homologous recombination, which are well known to those of skill in the art, and described, e.g., in Chappel, U.S. Pat. No. 5,272,071; PCT publication No. WO 91/06667, published May 16, 1991.

[2468] II. Isolated α₂δ-4 Polypeptides and Anti-α₂δ-4 Antibodies

[2469] One aspect of the invention pertains to isolated α₂δ-4 or recombinant polypeptides and polypeptides, and biologically active portions thereof, as well as polypeptide fragments suitable for use as immunogens to raise anti-α₂δ-4 antibodies. In one embodiment, native α₂δ-4 polypeptides can be isolated from cells or tissue sources by an appropriate purification scheme using standard protein purification techniques. In another embodiment, α₂δ-4 polypeptides are produced by recombinant DNA techniques. Alternative to recombinant expression, an α₂δ-4 polypeptide or polypeptide can be synthesized chemically using standard peptide synthesis techniques.

[2470] An “isolated” or “purified” polypeptide or biologically active portion thereof is substantially free of cellular material or other contaminating proteins from the cell or tissue source from which the α₂δ-4 polypeptide is derived, or substantially free from chemical precursors or other chemicals when chemically synthesized. The language “substantially free of cellular material” includes preparations of α₂δ-4 polypeptide in which the polypeptide is separated from cellular components of the cells from which it is isolated or recombinantly produced. In one embodiment, the language “substantially free of cellular material” includes preparations of α₂δ-4 polypeptide having less than about 30% (by dry weight) of non-α₂δ-4 polypeptide (also referred to herein as a “contaminating protein”), more preferably less than about 20% of non-α₂δ-4 polypeptide, still more preferably less than about 10% of non-α₂δ-4 polypeptide, and most preferably less than about 5% non-α₂δ-4 polypeptide. When the α₂δ-4 polypeptide or biologically active portion thereof is recombinantly produced, it is also preferably substantially free of culture medium, i.e., culture medium represents less than about 20%, more preferably less than about 10%, and most preferably less than about 5% of the volume of the protein preparation.

[2471] The language “substantially free of chemical precursors or other chemicals” includes preparations of α₂δ-4 polypeptide in which the polypeptide is separated from chemical precursors or other chemicals which are involved in the synthesis of the polypeptide. In one embodiment, the language “substantially free of chemical precursors or other chemicals” includes preparations of α₂δ-4 polypeptide having less than about 30% (by dry weight) of chemical precursors or non-α₂δ-4 chemicals, more preferably less than about 20% chemical precursors or non-α₂δ-4 chemicals, still more preferably less than about 10% chemical precursors or non-α₂δ-4 chemicals, and most preferably less than about 5% chemical precursors or non-α₂δ-4 chemicals.

[2472] As used herein, a “biologically active portion” of an α₂δ-4 polypeptide includes a fragment of an α₂δ-4 polypeptide which participates in an interaction between an α₂δ-4 molecule and a non-α₂δ-4 molecule. Biologically active portions of an α₂δ-4 polypeptide include peptides comprising amino acid sequences sufficiently identical to or derived from the amino acid sequence of the α₂δ-4 polypeptide, e.g., the amino acid sequence shown in SEQ ID NO:44, which include less amino acids than the full length α₂δ-4 polypeptides, and exhibit at least one activity of an α₂δ-4 polypeptide. Typically, biologically active portions comprise a domain or motif with at least one activity of the α₂δ-4 polypeptide, e.g., modulating membrane excitation mechanisms. A biologically active portion of an α₂δ-4 polypeptide can be a polypeptide which is, for example, 25, 30, 35, 40, 45, 50, 75, 100, 125, 150, 175, 200, 225, 250, 275, 300, 325, 350, 375, 400, 425, 450, 475, 500, 525, 550, 575, 600, 625, 650, 675, 700, 725, 750, 775, 800, 825, 850, 875, 900, 925, 950, 975, 1000, 1025, 1050, 1075, 1100, 1125, 1150, 1175, 1200 or more amino acids in length. Biologically active portions of an α₂δ-4 polypeptide can be used as targets for developing agents which modulate an α₂δ-4 mediated activity, e.g., a membrane excitation mechanism.

[2473] In one embodiment, a biologically active portion of an α₂δ-4 polypeptide comprises at least one transmembrane domain. It is to be understood that a preferred biologically active portion of an α₂δ-4 polypeptide of the present invention comprises at least one or more a transmembrane domain. Moreover, other biologically active portions, in which other regions of the polypeptide are deleted, can be prepared by recombinant techniques and evaluated for one or more of the functional activities of a native α₂δ-4 polypeptide.

[2474] Another aspect of the invention features fragments of the polypeptide having the amino acid sequence of SEQ ID NO:44, for example, for use as immunogens. In one embodiment, a fragment comprises at least 5 amino acids (e.g., contiguous or consecutive amino acids) of the amino acid sequence of SEQ ID NO:44, or an amino acid sequence encoded by the DNA insert of the plasmid deposited with the ATCC as Accession Number ______. In another embodiment, a fragment comprises at least 10, 15, 20, 25, 30, 35, 40, 45, 50 or more amino acids (e.g., contiguous or consecutive amino acids) of the amino acid sequence of SEQ ID NO:44, or an amino acid sequence encoded by the DNA insert of the plasmid deposited with the ATCC as Accession Number ______.

[2475] In a preferred embodiment, an α₂δ-4 polypeptide has an amino acid sequence shown in SEQ ID NO:44. In other embodiments, the α₂δ-4 polypeptide is substantially identical to SEQ ID NO:44, and retains the functional activity of the polypeptide of SEQ ID NO:44, yet differs in amino acid sequence due to natural allelic variation or mutagenesis, as described in detail in subsection I above. In another embodiment, the α₂δ-4 polypeptide is a polypeptide which comprises an amino acid sequence at least about 50%, 55%, 60%, 65%, 70%, 75%, 80%, 85%, 90%, 95%, 96%, 97%, 98%, 99% or more identical to SEQ ID NO:44.

[2476] In another embodiment, the invention features an α₂δ-4 polypeptide which is encoded by a nucleic acid molecule consisting of a nucleotide sequence at least about 50%, 55%, 60%, 65%, 70%, 75%, 80%, 85%, 90%, 95%, 96%, 97%, 98%, 99% or more identical to a nucleotide sequence of SEQ ID NO:43 or 45, or a complement thereof. This invention further features an α₂δ-4 polypeptide which is encoded by a nucleic acid molecule consisting of a nucleotide sequence which hybridizes under stringent hybridization conditions to a complement of a nucleic acid molecule comprising the nucleotide sequence of SEQ ID NO:43 or 45, or a complement thereof.

[2477] To determine the percent identity of two amino acid sequences or of two nucleic acid sequences, the sequences are aligned for optimal comparison purposes (e.g., gaps can be introduced in one or both of a first and a second amino acid or nucleic acid sequence for optimal alignment and non-identical sequences can be disregarded for comparison purposes). In a preferred embodiment, the length of a reference sequence aligned for comparison purposes is at least 30%, preferably at least 40%, more preferably at least 50%, even more preferably at least 60%, and even more preferably at least 70%, 80%, or 90% of the length of the reference sequence (e.g., when aligning a second sequence to the α₂δ-4 amino acid sequence of SEQ ID NO:44 having 1223 amino acid residues, at least 366, preferably at least 489, more preferably at least 611, more preferably at least 733, even more preferably at least 856, and even more preferably at least 978 or 1100 or more amino acid residues are aligned). The amino acid residues or nucleotides at corresponding amino acid positions or nucleotide positions are then compared. When a position in the first sequence is occupied by the same amino acid residue or nucleotide as the corresponding position in the second sequence, then the molecules are identical at that position (as used herein amino acid or nucleic acid “identity” is equivalent to amino acid or nucleic acid “homology”). The percent identity between the two sequences is a function of the number of identical positions shared by the sequences, taking into account the number of gaps, and the length of each gap, which need to be introduced for optimal alignment of the two sequences.

[2478] The comparison of sequences and determination of percent identity between two sequences can be accomplished using a mathematical algorithm. In a preferred embodiment, the percent identity between two amino acid sequences is determined using the Needleman and Wunsch (J. Mol. Biol. (48):444-453 (1970)) algorithm which has been incorporated into the GAP program in the GCG software package (available at http://www.gcg.com), using either a Blosum 62 matrix or a PAM250 matrix, and a gap weight of 16, 14, 12, 10, 8, 6, or 4 and a length weight of 1, 2, 3, 4, 5, or 6. In yet another preferred embodiment, the percent identity between two nucleotide sequences is determined using the GAP program in the GCG software package (available at http://www.gcg.com), using a NWSgapdna.CMP matrix and a gap weight of 40, 50, 60, 70, or 80 and a length weight of 1, 2, 3, 4, 5, or 6. A preferred, non-limiting example of parameters to be used in conjunction with the GAP program include a Blosum 62 scoring matrix with a gap penalty of 12, a gap extend penalty of 4, and a frameshift gap penalty of 5.

[2479] In another embodiment, the percent identity between two amino acid or nucleotide sequences is determined using the algorithm of E. Meyers and W. Miller (Comput. Appl. Biosci., 4:11-17 (1988)) which has been incorporated into the ALIGN program (version 2.0 or version 2.0U), using a PAM120 weight residue table, a gap length penalty of 12 and a gap penalty of 4.

[2480] The nucleic acid and polypeptide sequences of the present invention can further be used as a “query sequence” to perform a search against public databases to, for example, identify other family members or related sequences. Such searches can be performed using the NBLAST and XBLAST programs (version 2.0) of Altschul, et al. (1990) J. Mol. Biol. 215:403-10. BLAST nucleotide searches can be performed with the NBLAST program, score=100, wordlength=12 to obtain nucleotide sequences homologous to α₂δ-4 nucleic acid molecules of the invention. BLAST protein searches can be performed with the XBLAST program, score=100, wordlength=3, and a Blosum62 matrix to obtain amino acid sequences homologous to α₂δ-4 polypeptide molecules of the invention. To obtain gapped alignments for comparison purposes, Gapped BLAST can be utilized as described in Altschul et al., (1997) Nucleic Acids Res. 25(17):3389-3402. When utilizing BLAST and Gapped BLAST programs, the default parameters of the respective programs (e.g., XBLAST and NBLAST) can be used. See http://www.ncbi.nlm.nih.gov.

[2481] The invention also provides α₂δ-4 chimeric or fusion proteins. As used herein, an α₂δ-4 “chimeric protein” or “fusion protein” comprises an α₂δ-4 polypeptide operatively linked to a non-α₂δ-4 polypeptide. A “α₂δ-4 polypeptide” refers to a polypeptide having an amino acid sequence corresponding to α₂δ-4, whereas a “non-α₂δ-4 polypeptide” refers to a polypeptide having an amino acid sequence corresponding to a polypeptide which is not substantially homologous to the α₂δ-4 polypeptide, e.g., a polypeptide which is different from the α₂δ-4 polypeptide and which is derived from the same or a different organism. Within an α₂δ-4 fusion protein the α₂δ-4 polypeptide can correspond to all or a portion of an α₂δ-4 polypeptide. In a preferred embodiment, an α₂δ-4 fusion protein comprises at least one biologically active portion of an α₂δ-4 polypeptide. In another preferred embodiment, an α₂δ-4 fusion protein comprises at least two biologically active portions of an α₂δ-4 polypeptide. Within the fusion protein, the term “operatively linked” is intended to indicate that the α₂δ-4 polypeptide and the non-α₂δ-4 polypeptide are fused in-frame to each other. The non-α₂δ-4 polypeptide can be fused to the N-terminus or C-terminus of the α₂δ-4 polypeptide.

[2482] For example, in one embodiment, the fusion protein is a GST-α₂δ-4 fusion protein in which the α₂δ-4 sequences are fused to the C-terminus of the GST sequences. Such fusion proteins can facilitate the purification of recombinant α₂δ-4.

[2483] In another embodiment, the fusion protein is an α₂δ-4 polypeptide containing a heterologous signal sequence at its N-terminus. In certain host cells (e.g., mammalian host cells), expression and/or secretion of α₂δ-4 can be increased through the use of a heterologous signal sequence.

[2484] The α₂δ-4 fusion proteins of the invention can be incorporated into pharmaceutical compositions and administered to a subject in vivo. The α₂δ-4 fusion proteins can be used to affect the bioavailability of an α₂δ-4 substrate. Use of α₂δ-4 fusion proteins may be useful therapeutically for the treatment of disorders caused by, for example, (i) aberrant modification or mutation of a gene encoding an α₂δ-4 polypeptide; (ii) mis-regulation of the α₂δ-4 gene; and (iii) aberrant post-translational modification of an α₂δ-4 polypeptide.

[2485] Moreover, the α₂δ-4-fusion proteins of the invention can be used as immunogens to produce anti-α₂δ-4 antibodies in a subject, to purify α₂δ-4 ligands and in screening assays to identify molecules which inhibit the interaction of α₂δ-4 with an α₂δ-4 substrate.

[2486] Preferably, an α₂δ-4 chimeric or fusion protein of the invention is produced by standard recombinant DNA techniques. For example, DNA fragments coding for the different polypeptide sequences are ligated together in-frame in accordance with conventional techniques, for example by employing blunt-ended or stagger-ended termini for ligation, restriction enzyme digestion to provide for appropriate termini, filling-in of cohesive ends as appropriate, alkaline phosphatase treatment to avoid undesirable joining, and enzymatic ligation. In another embodiment, the fusion gene can be synthesized by conventional techniques including automated DNA synthesizers. Alternatively, PCR amplification of gene fragments can be carried out using anchor primers which give rise to complementary overhangs between two consecutive gene fragments which can subsequently be annealed and reamplified to generate a chimeric gene sequence (see, for example, Current Protocols in Molecular Biology, eds. Ausubel et al. John Wiley & Sons: 1992). Moreover, many expression vectors are commercially available that already encode a fusion moiety (e.g, a GST polypeptide). An α₂δ-4-encoding nucleic acid can be cloned into such an expression vector such that the fusion moiety is linked in-frame to the α₂δ-4 polypeptide.

[2487] The present invention also pertains to variants of the α₂δ-4 polypeptides which function as either α₂δ-4 agonists (mimetics) or as α₂δ-4 antagonists. Variants of the α₂δ-4 polypeptides can be generated by mutagenesis, e.g., discrete point mutation or truncation of an α₂δ-4 polypeptide. An agonist of the α₂δ-4 polypeptides can retain substantially the same, or a subset, of the biological activities of the naturally occurring form of an α₂δ-4 polypeptide. An antagonist of an α₂δ-4 polypeptide can inhibit one or more of the activities of the naturally occurring form of the α₂δ-4 polypeptide by, for example, competitively modulating an α₂δ-4-mediated activity of an α₂δ-4 polypeptide. Thus, specific biological effects can be elicited by treatment with a variant of limited function. In one embodiment, treatment of a subject with a variant having a subset of the biological activities of the naturally occurring form of the polypeptide has fewer side effects in a subject relative to treatment with the naturally occurring form of the α₂δ-4 polypeptide.

[2488] In one embodiment, variants of an α₂δ-4 polypeptide which function as either α₂δ-4 agonists (mimetics) or as α₂δ-4 antagonists can be identified by screening combinatorial libraries of mutants, e.g., truncation mutants, of an α₂δ-4 polypeptide for α₂δ-4 polypeptide agonist or antagonist activity. In one embodiment, a variegated library of α₂δ-4 variants is generated by combinatorial mutagenesis at the nucleic acid level and is encoded by a variegated gene library. A variegated library of α₂δ-4 variants can be produced by, for example, enzymatically ligating a mixture of synthetic oligonucleotides into gene sequences such that a degenerate set of potential α₂δ-4 sequences is expressible as individual polypeptides, or alternatively, as a set of larger fusion proteins (e.g., for phage display) containing the set of α₂δ-4 sequences therein. There are a variety of methods which can be used to produce libraries of potential α₂δ-4 variants from a degenerate oligonucleotide sequence. Chemical synthesis of a degenerate gene sequence can be performed in an automatic DNA synthesizer, and the synthetic gene then ligated into an appropriate expression vector. Use of a degenerate set of genes allows for the provision, in one mixture, of all of the sequences encoding the desired set of potential α₂δ-4 sequences. Methods for synthesizing degenerate oligonucleotides are known in the art (see, e.g., Narang, S. A. (1983) Tetrahedron 39:3; Itakura et al. (1984) Annu. Rev. Biochem. 53:323; Itakura et al. (1984) Science 198:1056; Ike et al. (1983) Nucleic Acid Res. 11:477.

[2489] In addition, libraries of fragments of an α₂δ-4 polypeptide coding sequence can be used to generate a variegated population of α₂δ-4 fragments for screening and subsequent selection of variants of an α₂δ-4 polypeptide. In one embodiment, a library of coding sequence fragments can be generated by treating a double stranded PCR fragment of an α₂δ-4 coding sequence with a nuclease under conditions wherein nicking occurs only about once per molecule, denaturing the double stranded DNA, renaturing the DNA to form double stranded DNA which can include sense/antisense pairs from different nicked products, removing single stranded portions from reformed duplexes by treatment with S1 nuclease, and ligating the resulting fragment library into an expression vector. By this method, an expression library can be derived which encodes N-terminal, C-terminal and internal fragments of various sizes of the α₂δ-4 polypeptide.

[2490] Several techniques are known in the art for screening gene products of combinatorial libraries made by point mutations or truncation, and for screening cDNA libraries for gene products having a selected property. Such techniques are adaptable for rapid screening of the gene libraries generated by the combinatorial mutagenesis of α₂δ-4 polypeptides. The most widely used techniques, which are amenable to high through-put analysis, for screening large gene libraries typically include cloning the gene library into replicable expression vectors, transforming appropriate cells with the resulting library of vectors, and expressing the combinatorial genes under conditions in which detection of a desired activity facilitates isolation of the vector encoding the gene whose product was detected. Recursive ensemble mutagenesis (REM), a new technique which enhances the frequency of functional mutants in the libraries, can be used in combination with the screening assays to identify α₂δ-4 variants (Arkin and Youvan (1992) Proc. Natl. Acad. Sci. USA 89:7811-7815; Delagrave et al. (1993) Protein Engineering 6(3):327-331).

[2491] In one embodiment, cell based assays can be exploited to analyze a variegated α₂δ-4 library. For example, a library of expression vectors can be transfected into a cell line, e.g., an endothelial cell line, which ordinarily responds to voltage regulation in a particular voltage-gated calcium channel substrate-dependent manner. The transfected cells are then contacted with α₂δ-4 and the effect of expression of the mutant on signaling by the voltage-gated calcium channel substrate can be detected, e.g., by monitoring intracellular calcium, IP3, or diacylglycerol concentration, phosphorylation profile of intracellular proteins, or the activity of a voltage-gated calcium channel-regulated transcription factor. Plasmid DNA can then be recovered from the cells which score for inhibition, or alternatively, potentiation of signaling by the voltage-gated calcium channel substrate, and the individual clones further characterized.

[2492] An isolated α₂δ-4 polypeptide, or a portion or fragment thereof, can be used as an immunogen to generate antibodies that bind α₂δ-4 using standard techniques for polyclonal and monoclonal antibody preparation. A full-length α₂δ-4 polypeptide can be used or, alternatively, the invention provides antigenic peptide fragments of α₂δ-4 for use as immunogens. The antigenic peptide of α₂δ-4 comprises at least 8 amino acid residues of the amino acid sequence shown in SEQ ID NO:44 and encompasses an epitope of α₂δ-4 such that an antibody raised against the peptide forms a specific immune complex with α₂δ-4. Preferably, the antigenic peptide comprises at least 10 amino acid residues, more preferably at least 15 amino acid residues, even more preferably at least 20 amino acid residues, and most preferably at least 30 amino acid residues.

[2493] Preferred epitopes encompassed by the antigenic peptide are regions of α₂δ-4 that are located on the surface of the polypeptide, e.g., hydrophilic regions, as well as regions with high antigenicity (see, for example, FIG. 42).

[2494] An α₂δ-4 immunogen typically is used to prepare antibodies by immunizing a suitable subject, (e.g., rabbit, goat, mouse or other mammal) with the immunogen. An appropriate immunogenic preparation can contain, for example, recombinantly expressed α₂δ-4 polypeptide or a chemically synthesized α₂δ-4 polypeptide. The preparation can further include an adjuvant, such as Freund's complete or incomplete adjuvant, or similar immunostimulatory agent. Immunization of a suitable subject with an immunogenic α₂δ-4 preparation induces a polyclonal anti-α₂δ-4 antibody response.

[2495] Accordingly, another aspect of the invention pertains to anti-α₂δ-4 antibodies. The term “antibody” as used herein refers to immunoglobulin molecules and immunologically active portions of immunoglobulin molecules, i.e., molecules that contain an antigen binding site which specifically binds (immunoreacts with) an antigen, such as α₂δ-4. Examples of immunologically active portions of immunoglobulin molecules include F(ab) and F(ab′)₂ fragments which can be generated by treating the antibody with an enzyme such as pepsin. The invention provides polyclonal and monoclonal antibodies that bind α₂δ-4. The term “monoclonal antibody” or “monoclonal antibody composition”, as used herein, refers to a population of antibody molecules that contain only one species of an antigen binding site capable of immunoreacting with a particular epitope of α₂δ-4. A monoclonal antibody composition thus typically displays a single binding affinity for a particular α₂δ-4 polypeptide with which it immunoreacts.

[2496] Polyclonal anti-α₂δ-4 antibodies can be prepared as described above by immunizing a suitable subject with an α₂δ-4 immunogen. The anti-α₂δ-4 antibody titer in the immunized subject can be monitored over time by standard techniques, such as with an enzyme linked immunosorbent assay (ELISA) using immobilized α₂δ-4. If desired, the antibody molecules directed against α₂δ-4 can be isolated from the mammal (e.g., from the blood) and further purified by well known techniques, such as protein A chromatography to obtain the IgG fraction. At an appropriate time after immunization, e.g., when the anti-α₂δ-4 antibody titers are highest, antibody-producing cells can be obtained from the subject and used to prepare monoclonal antibodies by standard techniques, such as the hybridoma technique originally described by Kohler and Milstein (1975) Nature 256:495-497) (see also, Brown et al. (1981) J. Immunol. 127:539-46; Brown et al. (1980) J. Biol. Chem .255:4980-83; Yeh et al. (1976) Proc. Natl. Acad. Sci. USA 76:2927-31; and Yeh et al. (1982) Int. J. Cancer 29:269-75), the more recent human B cell hybridoma technique (Kozbor et al. (1983) Immunol Today 4:72), the EBV-hybridoma technique (Cole et al. (1985), Monoclonal Antibodies and Cancer Therapy, Alan R. Liss, Inc., pp. 77-96) or trioma techniques. The technology for producing monoclonal antibody hybridomas is well known (see generally R. H. Kenneth, in Monoclonal Antibodies: A New Dimension In Biological Analyses, Plenum Publishing Corp., New York, N.Y. (1980); E. A. Lerner (1981) Yale J. Biol. Med., 54:387-402; M. L. Gefter et al. (1977) Somatic Cell Genet. 3:231-36). Briefly, an immortal cell line (typically a myeloma) is fused to lymphocytes (typically splenocytes) from a mammal immunized with an α₂δ-4 immunogen as described above, and the culture supernatants of the resulting hybridoma cells are screened to identify a hybridoma producing a monoclonal antibody that binds α₂δ-4.

[2497] Any of the many well known protocols used for fusing lymphocytes and immortalized cell lines can be applied for the purpose of generating an anti-α₂δ-4 monoclonal antibody (see, e.g., G. Galfre et al. (1977) Nature 266:55052; Gefter et al. Somatic Cell Genet., cited supra; Lerner, Yale J. Biol. Med., cited supra; Kenneth, Monoclonal Antibodies, cited supra). Moreover, the ordinarily skilled worker will appreciate that there are many variations of such methods which also would be useful. Typically, the immortal cell line (e.g., a myeloma cell line) is derived from the same mammalian species as the lymphocytes. For example, murine hybridomas can be made by fusing lymphocytes from a mouse immunized with an immunogenic preparation of the present invention with an immortalized mouse cell line. Preferred immortal cell lines are mouse myeloma cell lines that are sensitive to culture medium containing hypoxanthine, aminopterin and thymidine (“HAT medium”). Any of a number of myeloma cell lines can be used as a fusion partner according to standard techniques, e.g., the P3-NS1/1-Ag4-1, P3-x63-Ag8.653 or Sp2/O-Ag14 myeloma lines. These myeloma lines are available from ATCC. Typically, HAT-sensitive mouse myeloma cells are fused to mouse splenocytes using polyethylene glycol (“PEG”). Hybridoma cells resulting from the fusion are then selected using HAT medium, which kills unfused and unproductively fused myeloma cells (unfused splenocytes die after several days because they are not transformed). Hybridoma cells producing a monoclonal antibody of the invention are detected by screening the hybridoma culture supernatants for antibodies that bind α₂δ-4, e.g., using a standard ELISA assay.

[2498] Alternative to preparing monoclonal antibody-secreting hybridomas, a monoclonal anti-α₂δ-4 antibody can be identified and isolated by screening a recombinant combinatorial immunoglobulin library (e.g., an antibody phage display library) with α₂δ-4 to thereby isolate immunoglobulin library members that bind α₂δ-4. Kits for generating and screening phage display libraries are commercially available (e.g., the Pharmacia Recombinant Phage Antibody System, Catalog No. 27-9400-01; and the Stratagene SurfZAP™ Phage Display Kit, Catalog No. 240612). Additionally, examples of methods and reagents particularly amenable for use in generating and screening antibody display library can be found in, for example, Ladner et al. U.S. Pat. No. 5,223,409; Kang et al. PCT International Publication No. WO 92/18619; Dower et al. PCT International Publication No. WO 91/17271; Winter et al. PCT International Publication WO 92/20791; Markland et al. PCT International Publication No. WO 92/15679; Breitling et al. PCT International Publication WO 93/01288; McCafferty et al. PCT International Publication No. WO 92/01047; Garrard et al. PCT International Publication No. WO 92/09690; Ladner et al. PCT International Publication No. WO 90/02809; Fuchs et al. (1991) Bio/Technology 9:1370-1372; Hay et al. (1992) Hum. Antibod. Hybridomas 3:81-85; Huse et al. (1989) Science 246:1275-1281; Griffiths et al. (1993) EMBO J 12:725-734; Hawkins et al. (1992) J. Mol. Biol. 226:889-896; Clackson et al. (1991) Nature 352:624-628; Gram et al. (1992) Proc. Natl. Acad. Sci. USA 89:3576-3580; Garrard et al. (1991) Bio/Technology 9:1373-1377; Hoogenboom et al. (1991) Nuc. Acid Res. 19:4133-4137; Barbas et al. (1991) Proc. Natl. Acad. Sci. USA 88:7978-7982; and McCafferty et al. Nature (1990) 348:552-554.

[2499] Additionally, recombinant anti-α₂δ-4 antibodies, such as chimeric and humanized monoclonal antibodies, comprising both human and non-human portions, which can be made using standard recombinant DNA techniques, are within the scope of the invention. Such chimeric and humanized monoclonal antibodies can be produced by recombinant DNA techniques known in the art, for example using methods described in Robinson et al. International Application No. PCT/US86/02269; Akira, et al. European Patent Application 184,187; Taniguchi, M., European Patent Application 171,496; Morrison et al. European Patent Application 173,494; Neuberger et al. PCT International Publication No. WO 86/01533; Cabilly et al. U.S. Pat. No. 4,816,567; Cabilly et al. European Patent Application 125,023; Better et al. (1988) Science 240:1041-1043; Liu et al. (1987) Proc. Natl. Acad. Sci. USA 84:3439-3443; Liu et al. (1987) J. Immunol. 139:3521-3526; Sun et al. (1987) Proc. Natl. Acad. Sci. USA 84:214-218; Nishimura et al. (1987) Canc. Res. 47:999-1005; Wood et al. (1985) Nature 314:446-449; and Shaw et al. (1988) J. Natl. Cancer Inst. 80:1553-1559); Morrison, S. L. (1985) Science 229:1202-1207; Oi et al. (1986) BioTechniques 4:214; Winter U.S. Pat. No. 5,225,539; Jones et al. (1986) Nature 321:552-525; Verhoeyen et al. (1988) Science 239:1534; and Beidler et al. (1988) J. Immunol. 141:4053-4060.

[2500] An anti-α₂δ-4 antibody (e.g, monoclonal antibody) can be used to isolate α₂δ-4 by standard techniques, such as affinity chromatography or immunoprecipitation. An anti-α₂δ-4 antibody can facilitate the purification of natural α₂δ-4 from cells and of recombinantly produced α₂δ-4 expressed in host cells. Moreover, an anti-α₂δ-4 antibody can be used to detect α₂δ-4 polypeptide (e.g., in a cellular lysate or cell supernatant) in order to evaluate the abundance and pattern of expression of the α₂δ-4 polypeptide. Anti-α₂δ-4 antibodies can be used diagnostically to monitor polypeptide levels in tissue as part of a clinical testing procedure, e.g., to, for example, determine the efficacy of a given treatment regimen. Detection can be facilitated by coupling (i.e., physically linking) the antibody to a detectable substance. Examples of detectable substances include various enzymes, prosthetic groups, fluorescent materials, luminescent materials, bioluminescent materials, and radioactive materials. Examples of suitable enzymes include horseradish peroxidase, alkaline phosphatase, β-galactosidase, or acetylcholinesterase; examples of suitable prosthetic group complexes include streptavidin/biotin and avidin/biotin; examples of suitable fluorescent materials include umbelliferone, fluorescein, fluorescein isothiocyanate, rhodamine, dichlorotriazinylamine fluorescein, dansyl chloride or phycoerythrin; an example of a luminescent material includes luminol; examples of bioluminescent materials include luciferase, luciferin, and aequorin, and examples of suitable radioactive material include ¹²⁵I, ¹³¹I, ³⁵S or ³H.

[2501] III. Recombinant Expression Vectors and Host Cells

[2502] Another aspect of the invention pertains to vectors, for example recombinant expression vectors, containing a nucleic acid containing an α₂δ-4 nucleic acid molecule or vectors containing a nucleic acid molecule which encodes an α₂δ-4 polypeptide (or a portion thereof). As used herein, the term “vector” refers to a nucleic acid molecule capable of transporting another nucleic acid to which it has been linked. One type of vector is a “plasmid”, which refers to a circular double stranded DNA loop into which additional DNA segments can be ligated. Another type of vector is a viral vector, wherein additional DNA segments can be ligated into the viral genome. Certain vectors are capable of autonomous replication in a host cell into which they are introduced (e.g., bacterial vectors having a bacterial origin of replication and episomal mammalian vectors). Other vectors (e.g., non-episomal mammalian vectors) are integrated into the genome of a host cell upon introduction into the host cell, and thereby are replicated along with the host genome. Moreover, certain vectors are capable of directing the expression of genes to which they are operatively linked. Such vectors are referred to herein as “expression vectors”. In general, expression vectors of utility in recombinant DNA techniques are often in the form of plasmids. In the present specification, “plasmid” and “vector” can be used interchangeably as the plasmid is the most commonly used form of vector. However, the invention is intended to include such other forms of expression vectors, such as viral vectors (e.g., replication defective retroviruses, adenoviruses and adeno-associated viruses), which serve equivalent functions.

[2503] The recombinant expression vectors of the invention comprise a nucleic acid of the invention in a form suitable for expression of the nucleic acid in a host cell, which means that the recombinant expression vectors include one or more regulatory sequences, selected on the basis of the host cells to be used for expression, which is operatively linked to the nucleic acid sequence to be expressed. Within a recombinant expression vector, “operably linked” is intended to mean that the nucleotide sequence of interest is linked to the regulatory sequence(s) in a manner which allows for expression of the nucleotide sequence (e.g., in an in vitro transcription/translation system or in a host cell when the vector is introduced into the host cell). The term “regulatory sequence” is intended to include promoters, enhancers and other expression control elements (e.g., polyadenylation signals). Such regulatory sequences are described, for example, in Goeddel; Gene Expression Technology: Methods in Enzymology 185, Academic Press, San Diego, Calif. (1990). Regulatory sequences include those which direct constitutive expression of a nucleotide sequence in many types of host cells and those which direct expression of the nucleotide sequence only in certain host cells (e.g., tissue-specific regulatory sequences). It will be appreciated by those skilled in the art that the design of the expression vector can depend on such factors as the choice of the host cell to be transformed, the level of expression of polypeptide desired, and the like. The expression vectors of the invention can be introduced into host cells to thereby produce proteins or peptides, including fusion proteins or peptides, encoded by nucleic acids as described herein (e.g., α₂δ-4 polypeptides, mutant forms of α₂δ-4 polypeptides, fusion proteins, and the like).

[2504] Accordingly, an exemplary embodiment provides a method for producing a polypeptide, preferably an α₂δ-4 polypeptide, by culturing in a suitable medium a host cell of the invention (e.g., a mammalian host cell such as a non-human mammalian cell) containing a recombinant expression vector, such that the polypeptide is produced.

[2505] The recombinant expression vectors of the invention can be designed for expression of α₂δ-4 polypeptides in prokaryotic or eukaryotic cells. For example, α₂δ-4 polypeptides can be expressed in bacterial cells such as E. coli, insect cells (using baculovirus expression vectors) yeast cells or mammalian cells. Suitable host cells are discussed further in Goeddel, Gene Expression Technology: Methods in Enzymology 185, Academic Press, San Diego, Calif. (1990). Alternatively, the recombinant expression vector can be transcribed and translated in vitro, for example using T7 promoter regulatory sequences and T7 polymerase.

[2506] Expression of proteins in prokaryotes is most often carried out in E. coli with vectors containing constitutive or inducible promoters directing the expression of either fusion or non-fusion proteins. Fusion vectors add a number of amino acids to a protein encoded therein, usually to the amino terminus of the recombinant protein. Such fusion vectors typically serve three purposes: 1) to increase expression of recombinant protein; 2) to increase the solubility of the recombinant protein; and 3) to aid in the purification of the recombinant protein by acting as a ligand in affinity purification. Often, in fusion expression vectors, a proteolytic cleavage site is introduced at the junction of the fusion moiety and the recombinant protein to enable separation of the recombinant protein from the fusion moiety subsequent to purification of the fusion protein. Such enzymes, and their cognate recognition sequences, include Factor Xa, thrombin and enterokinase. Typical fusion expression vectors include pGEX (Pharmacia Biotech Inc; Smith, D. B. and Johnson, K. S. (1988) Gene 67:31-40), pMAL (New England Biolabs, Beverly, Mass.) and pRIT5 (Pharmacia, Piscataway, N.J.) which fuse glutathione S-transferase (GST), maltose E binding protein, or protein A, respectively, to the target recombinant protein.

[2507] Purified fusion proteins can be utilized in α₂δ-4 activity assays, (e.g., direct assays or competitive assays described in detail below), or to generate antibodies specific for α₂δ-4 polypeptides, for example. In a preferred embodiment, an α₂δ-4 fusion protein expressed in a retroviral expression vector of the present invention can be utilized to infect bone marrow cells which are subsequently transplanted into irradiated recipients. The pathology of the subject recipient is then examined after sufficient time has passed (e.g., six (6) weeks).

[2508] Examples of suitable inducible non-fusion E. coli expression vectors include pTrc (Amann et al., (1988) Gene 69:301-315) and pET 11d (Studier et al., Gene Expression Technology: Methods in Enzymology 185, Academic Press, San Diego, Calif. (1990) 60-89). Target gene expression from the pTrc vector relies on host RNA polymerase transcription from a hybrid trp-lac fusion promoter. Target gene expression from the pET 11d vector relies on transcription from a T7 gn10-lac fusion promoter mediated by a coexpressed viral RNA polymerase (T7 gn1). This viral polymerase is supplied by host strains BL21(DE3) or HMS174(DE3) from a resident prophage harboring a T7 gn1 gene under the transcriptional control of the lacUV 5 promoter.

[2509] One strategy to maximize recombinant protein expression in E. coli is to express the protein in a host bacteria with an impaired capacity to proteolytically cleave the recombinant protein (Gottesman, S., Gene Expression Technology: Methods in Enzymology 185, Academic Press, San Diego, Calif. (1990) 119-128). Another strategy is to alter the nucleic acid sequence of the nucleic acid to be inserted into an expression vector so that the individual codons for each amino acid are those preferentially utilized in E. coli (Wada et al., (1992) Nucleic Acids Res. 20:2111-2118). Such alteration of nucleic acid sequences of the invention can be carried out by standard DNA synthesis techniques.

[2510] In another embodiment, the α₂δ-4 expression vector is a yeast expression vector. Examples of vectors for expression in yeast S. cerevisiae include pYepSec1 (Baldari, et al., (1987) EMBO J. 6:229-234), pMFa (Kurjan and Herskowitz, (1982) Cell 30:933-943), pJRY88 (Schultz et al, (1987) Gene 54:113-123), pYES2 (Invitrogen Corporation, San Diego, Calif.), and picZ (Invitrogen Corporation, San Diego, Calif.).

[2511] Alternatively, α₂δ-4 polypeptides can be expressed in insect cells using baculovirus expression vectors. Baculovirus vectors available for expression of proteins in cultured insect cells (e.g., Sf 9 cells) include the pAc series (Smith et al. (1983) Mol. Cell Biol. 3:2156-2165) and the pVL series (Lucklow and Summers (1989) Virology 170:31-39).

[2512] In yet another embodiment, a nucleic acid of the invention is expressed in mammalian cells using a mammalian expression vector. Examples of mammalian expression vectors include pCDM8 (Seed, B. (1987) Nature 329:840) and pMT2PC (Kaufman et al. (1987) EMBO J. 6:187-195). When used in mammalian cells, the expression vector's control functions are often provided by viral regulatory elements. For example, commonly used promoters are derived from polyoma, Adenovirus 2, cytomegalovirus and Simian Virus 40. For other suitable expression systems for both prokaryotic and eukaryotic cells see chapters 16 and 17 of Sambrook, J., Fritsh, E. F., and Maniatis, T. Molecular Cloning: A Laboratory Manual. 2nd, ed., Cold Spring Harbor Laboratory, Cold Spring Harbor Laboratory Press, Cold Spring Harbor, N.Y., 1989.

[2513] In another embodiment, the recombinant mammalian expression vector is capable of directing expression of the nucleic acid preferentially in a particular cell type (e.g., tissue-specific regulatory elements are used to express the nucleic acid). Tissue-specific regulatory elements are known in the art. Non-limiting examples of suitable tissue-specific promoters include the albumin promoter (liver-specific; Pinkert et al. (1987) Genes Dev. 1:268-277), lymphoid-specific promoters (Calame and Eaton (1988) Adv. Immunol. 43:235-275), in particular promoters of T cell receptors (Winoto and Baltimore (1989) EMBO J. 8:729-733) and immunoglobulins (Banerji et al. (1983) Cell 33:729-740; Queen and Baltimore (1983) Cell 33:741-748), neuron-specific promoters (e.g., the neurofilament promoter; Byrne and Ruddle (1989) Proc. Natl. Acad. Sci. USA 86:5473-5477), pancreas-specific promoters (Edlund et al. (1985) Science 230:912-916), and mammary gland-specific promoters (e.g., milk whey promoter; U.S. Pat. No. 4,873,316 and European Application Publication No. 264,166). Developmentally-regulated promoters are also encompassed, for example the murine hox promoters (Kessel and Gruss (1990) Science 249:374-379) and the α-fetoprotein promoter (Campes and Tilghman (1989) Genes Dev. 3:537-546).

[2514] The invention further provides a recombinant expression vector comprising a DNA molecule of the invention cloned into the expression vector in an antisense orientation. That is, the DNA molecule is operatively linked to a regulatory sequence in a manner which allows for expression (by transcription of the DNA molecule) of an RNA molecule which is antisense to α₂δ-4 mRNA. Regulatory sequences operatively linked to a nucleic acid cloned in the antisense orientation can be chosen which direct the continuous expression of the antisense RNA molecule in a variety of cell types, for instance viral promoters and/or enhancers, or regulatory sequences can be chosen which direct constitutive, tissue specific or cell type specific expression of antisense RNA. The antisense expression vector can be in the form of a recombinant plasmid, phagemid or attenuated virus in which antisense nucleic acids are produced under the control of a high efficiency regulatory region, the activity of which can be determined by the cell type into which the vector is introduced. For a discussion of the regulation of gene expression using antisense genes see Weintraub, H. et al., Antisense RNA as a molecular tool for genetic analysis, Reviews—Trends in Genetics, Vol. 1(1) 1986.

[2515] Another aspect of the invention pertains to host cells into which an α₂δ-4 nucleic acid molecule of the invention is introduced, e.g., an α₂δ-4 nucleic acid molecule within a vector (e.g., a recombinant expression vector) or an α₂δ-4 nucleic acid molecule containing sequences which allow it to homologously recombine into a specific site of the host cell's genome. The terms “host cell” and “recombinant host cell” are used interchangeably herein. It is understood that such terms refer not only to the particular subject cell but to the progeny or potential progeny of such a cell. Because certain modifications may occur in succeeding generations due to either mutation or environmental influences, such progeny may not, in fact, be identical to the parent cell, but are still included within the scope of the term as used herein.

[2516] A host cell can be any prokaryotic or eukaryotic cell. For example, an α₂δ-4 polypeptide can be expressed in bacterial cells such as E. coli, insect cells, yeast or mammalian cells (such as Chinese hamster ovary cells (CHO) or COS cells). Other suitable host cells are known to those skilled in the art.

[2517] Vector DNA can be introduced into prokaryotic or eukaryotic cells via conventional transformation or transfection techniques. As used herein, the terms “transformation” and “transfection” are intended to refer to a variety of art-recognized techniques for introducing foreign nucleic acid (e.g., DNA) into a host cell, including calcium phosphate or calcium chloride co-precipitation, DEAE-dextran-mediated transfection, lipofection, or electroporation. Suitable methods for transforming or transfecting host cells can be found in Sambrook, et al. (Molecular Cloning: A Laboratory Manual. 2nd, ed., Cold Spring Harbor Laboratory, Cold Spring Harbor Laboratory Press, Cold Spring Harbor, N.Y., 1989), and other laboratory manuals.

[2518] For stable transfection of mammalian cells, it is known that, depending upon the expression vector and transfection technique used, only a small fraction of cells may integrate the foreign DNA into their genome. In order to identify and select these integrants, a gene that encodes a selectable marker (e.g., resistance to antibiotics) is generally introduced into the host cells along with the gene of interest. Preferred selectable markers include those which confer resistance to drugs, such as G418, hygromycin and methotrexate. Nucleic acid encoding a selectable marker can be introduced into a host cell on the same vector as that encoding an α₂δ-4 polypeptide or can be introduced on a separate vector. Cells stably transfected with the introduced nucleic acid can be identified by drug selection (e.g., cells that have incorporated the selectable marker gene will survive, while the other cells die).

[2519] A host cell of the invention, such as a prokaryotic or eukaryotic host cell in culture, can be used to produce (i.e., express) an α₂δ-4 polypeptide. Accordingly, the invention further provides methods for producing an α₂δ-4 polypeptide using the host cells of the invention. In one embodiment, the method comprises culturing the host cell of the invention (into which a recombinant expression vector encoding an α₂δ-4 polypeptide has been introduced) in a suitable medium such that an α₂δ-4 polypeptide is produced. In another embodiment, the method further comprises isolating an α₂δ-4 polypeptide from the medium or the host cell.

[2520] The host cells of the invention can also be used to produce non-human transgenic animals. For example, in one embodiment, a host cell of the invention is a fertilized oocyte or an embryonic stem cell into which α₂δ-4-coding sequences have been introduced. Such host cells can then be used to create non-human transgenic animals in which exogenous α₂δ-4 sequence have been introduced into their genome or homologous recombinant animals in which endogenous α₂δ-4 sequences have been altered. Such animals are useful for studying the function and/or activity of an α₂δ-4 and for identifying and/or evaluating modulators of α₂δ-4 activity. As used herein, a “transgenic animal” is a non-human animal, preferably a mammal, more preferably a rodent such as a rat or mouse, in which one or more of the cells of the animal includes a transgene. Other examples of transgenic animals include non-human primates, sheep, dogs, cows, goats, chickens, amphibians, and the like. A transgene is exogenous DNA which is integrated into the genome of a cell from which a transgenic animal develops and which remains in the genome of the mature animal, thereby directing the expression of an encoded gene product in one or more cell types or tissues of the transgenic animal. As used herein, a “homologous recombinant animal” is a non-human animal, preferably a mammal, more preferably a mouse, in which an endogenous α₂δ-4 gene has been altered by homologous recombination between the endogenous gene and an exogenous DNA molecule introduced into a cell of the animal, e.g., an embryonic cell of the animal, prior to development of the animal.

[2521] A transgenic animal of the invention can be created by introducing an α₂δ-4-encoding nucleic acid into the male pronuclei of a fertilized oocyte, e.g., by microinjection, retroviral infection, and allowing the oocyte to develop in a pseudopregnant female foster animal. The α₂δ-4 cDNA sequence of SEQ ID NO:1 can be introduced as a transgene into the genome of a non-human animal. Alternatively, a nonhuman homologue of a human α₂δ-4 gene, such as a mouse or rat α₂δ-4 gene, can be used as a transgene. Alternatively, an α₂δ-4 gene homologue, such as another α₂δ-4 family member, can be isolated based on hybridization to the α₂δ-4 cDNA sequences of SEQ ID NO:43 or 45, or the DNA insert of the plasmid deposited with ATCC as Accession Number ______ (described further in subsection I above) and used as a transgene. Intronic sequences and polyadenylation signals can also be included in the transgene to increase the efficiency of expression of the transgene. A tissue-specific regulatory sequence(s) can be operably linked to an α₂δ-4 transgene to direct expression of an α₂δ-4 polypeptide to particular cells. Methods for generating transgenic animals via embryo manipulation and microinjection, particularly animals such as mice, have become conventional in the art and are described, for example, in U.S. Pat. Nos. 4,736,866 and 4,870,009, both by Leder et al., U.S. Pat. No. 4,873,191 by Wagner et al. and in Hogan, B., Manipulating the Mouse Embryo, (Cold Spring Harbor Laboratory Press, Cold Spring Harbor, N.Y., 1986). Similar methods are used for production of other transgenic animals. A transgenic founder animal can be identified based upon the presence of an α₂δ-4 transgene in its genome and/or expression of α₂δ-4 mRNA in tissues or cells of the animals. A transgenic founder animal can then be used to breed additional animals carrying the transgene. Moreover, transgenic animals carrying a transgene encoding an α₂δ-4 polypeptide can further be bred to other transgenic animals carrying other transgenes.

[2522] To create a homologous recombinant animal, a vector is prepared which contains at least a portion of an α₂δ-4 gene into which a deletion, addition or substitution has been introduced to thereby alter, e.g., functionally disrupt, the α₂δ-4 gene. The α₂δ-4 gene can be a human gene (e.g., the cDNA of SEQ ID NO:3), but more preferably, is a non-human homologue of a human α₂δ-4 gene (e.g., a cDNA isolated by stringent hybridization with the nucleotide sequence of SEQ ID NO:1). For example, a mouse α₂δ-4 gene can be used to construct a homologous recombination nucleic acid molecule, e.g., a vector, suitable for altering an endogenous α₂δ-4 gene in the mouse genome. In a preferred embodiment, the homologous recombination nucleic acid molecule is designed such that, upon homologous recombination, the endogenous α₂δ-4 gene is functionally disrupted (i.e., no longer encodes a functional protein; also referred to as a “knock out” vector). Alternatively, the homologous recombination nucleic acid molecule can be designed such that, upon homologous recombination, the endogenous α₂δ-4 gene is mutated or otherwise altered but still encodes functional polypeptide (e.g., the upstream regulatory region can be altered to thereby alter the expression of the endogenous α₂δ-4 polypeptide). In the homologous recombination nucleic acid molecule, the altered portion of the α₂δ-4 gene is flanked at its 5′ and 3′ ends by additional nucleic acid sequence of the α₂δ-4 gene to allow for homologous recombination to occur between the exogenous α₂δ-4 gene carried by the homologous recombination nucleic acid molecule and an endogenous α₂δ-4 gene in a cell, e.g., an embryonic stem cell. The additional flanking α₂δ-4 nucleic acid sequence is of sufficient length for successful homologous recombination with the endogenous gene. Typically, several kilobases of flanking DNA (both at the 5′ and 3′ ends) are included in the homologous recombination nucleic acid molecule (see, e.g., Thomas, K. R. and Capecchi, M. R. (1987) Cell 51:503 for a description of homologous recombination vectors). The homologous recombination nucleic acid molecule is introduced into a cell, e.g., an embryonic stem cell line (e.g., by electroporation) and cells in which the introduced α₂δ-4 gene has homologously recombined with the endogenous α₂δ-4 gene are selected (see e.g., Li, E. et al. (1992) Cell 69:915). The selected cells can then injected into a blastocyst of an animal (e.g., a mouse) to form aggregation chimeras (see e.g., Bradley, A. in Teratocarcinomas and Embryonic Stem Cells: A Practical Approach, E. J. Robertson, ed. (IRL, Oxford, 1987) pp. 113-152). A chimeric embryo can then be implanted into a suitable pseudopregnant female foster animal and the embryo brought to term. Progeny harboring the homologously recombined DNA in their germ cells can be used to breed animals in which all cells of the animal contain the homologously recombined DNA by germline transmission of the transgene. Methods for constructing homologous recombination nucleic acid molecules, e.g., vectors, or homologous recombinant animals are described further in Bradley, A. (1991) Current Opinion in Biotechnology 2:823-829 and in PCT International Publication Nos.: WO 90/11354 by Le Mouellec et al.; WO 91/01140 by Smithies et al.; WO 92/0968 by Zijlstra et al.; and WO 93/04169 by Berns et al.

[2523] In another embodiment, transgenic non-human animals can be produced which contain selected systems which allow for regulated expression of the transgene. One example of such a system is the cre/loxP recombinase system of bacteriophage P1. For a description of the cre/loxP recombinase system, see, e.g., Lakso et al. (1992) Proc. Natl. Acad. Sci. USA 89:6232-6236. Another example of a recombinase system is the FLP recombinase system of Saccharomyces cerevisiae (O'Gorman et al. (1991) Science 251:1351-1355. If a cre/loxP recombinase system is used to regulate expression of the transgene, animals containing transgenes encoding both the Cre recombinase and a selected protein are required. Such animals can be provided through the construction of “double” transgenic animals, e.g., by mating two transgenic animals, one containing a transgene encoding a selected protein and the other containing a transgene encoding a recombinase.

[2524] Clones of the non-human transgenic animals described herein can also be produced according to the methods described in Wilmut, I. et al. (1997) Nature 385:810-813 and PCT International Publication Nos. WO 97/07668 and WO 97/07669. In brief, a cell, e.g., a somatic cell, from the transgenic animal can be isolated and induced to exit the growth cycle and enter G_{O} phase. The quiescent cell can then be fused, e.g., through the use of electrical pulses, to an enucleated oocyte from an animal of the same species from which the quiescent cell is isolated. The reconstructed oocyte is then cultured such that it develops to morula or blastocyte and then transferred to pseudopregnant female foster animal. The offspring borne of this female foster animal will be a clone of the animal from which the cell, e.g., the somatic cell, is isolated.

[2525] IV. Pharmaceutical Compositions

[2526] The α₂δ-4 nucleic acid molecules, fragments of α₂δ-4 polypeptides, and anti-α₂δ-4 antibodies (also referred to herein as “active compounds”) of the invention can be incorporated into pharmaceutical compositions suitable for administration. Such compositions typically comprise the nucleic acid molecule, polypeptide, or antibody and a pharmaceutically acceptable carrier. As used herein the language “pharmaceutically acceptable carrier” is intended to include any and all solvents, dispersion media, coatings, antibacterial and antifungal agents, isotonic and absorption delaying agents, and the like, compatible with pharmaceutical administration. The use of such media and agents for pharmaceutically active substances is well known in the art. Except insofar as any conventional media or agent is incompatible with the active compound, use thereof in the compositions is contemplated. Supplementary active compounds can also be incorporated into the compositions.

[2527] A pharmaceutical composition of the invention is formulated to be compatible with its intended route of administration. Examples of routes of administration include parenteral, e.g., intravenous, intradermal, subcutaneous, oral (e.g., inhalation), transdermal (topical), transmucosal, and rectal administration. Solutions or suspensions used for parenteral, intradermal, or subcutaneous application can include the following components: a sterile diluent such as water for injection, saline solution, fixed oils, polyethylene glycols, glycerine, propylene glycol or other synthetic solvents; antibacterial agents such as benzyl alcohol or methyl parabens; antioxidants such as ascorbic acid or sodium bisulfite; chelating agents such as ethylenediaminetetraacetic acid; buffers such as acetates, citrates or phosphates and agents for the adjustment of tonicity such as sodium chloride or dextrose. pH can be adjusted with acids or bases, such as hydrochloric acid or sodium hydroxide. The parenteral preparation can be enclosed in ampoules, disposable syringes or multiple dose vials made of glass or plastic.

[2528] Pharmaceutical compositions suitable for injectable use include sterile aqueous solutions (where water soluble) or dispersions and sterile powders for the extemporaneous preparation of sterile injectable solutions or dispersion. For intravenous administration, suitable carriers include physiological saline, bacteriostatic water, Cremophor EL™ (BASF, Parsippany, N.J.) or phosphate buffered saline (PBS). In all cases, the composition must be sterile and should be fluid to the extent that easy syringeability exists. It must be stable under the conditions of manufacture and storage and must be preserved against the contaminating action of microorganisms such as bacteria and fungi. The carrier can be a solvent or dispersion medium containing, for example, water, ethanol, polyol (for example, glycerol, propylene glycol, and liquid polyetheylene glycol, and the like), and suitable mixtures thereof. The proper fluidity can be maintained, for example, by the use of a coating such as lecithin, by the maintenance of the required particle size in the case of dispersion and by the use of surfactants. Prevention of the action of microorganisms can be achieved by various antibacterial and antifungal agents, for example, parabens, chlorobutanol, phenol, ascorbic acid, thimerosal, and the like. In many cases, it will be preferable to include isotonic agents, for example, sugars, polyalcohols such as manitol, sorbitol, sodium chloride in the composition. Prolonged absorption of the injectable compositions can be brought about by including in the composition an agent which delays absorption, for example, aluminum monostearate and gelatin.

[2529] Sterile injectable solutions can be prepared by incorporating the active compound (e.g., a fragment of an α₂δ-4 polypeptide or an anti-α₂δ-4 antibody) in the required amount in an appropriate solvent with one or a combination of ingredients enumerated above, as required, followed by filtered sterilization. Generally, dispersions are prepared by incorporating the active compound into a sterile vehicle which contains a basic dispersion medium and the required other ingredients from those enumerated above. In the case of sterile powders for the preparation of sterile injectable solutions, the preferred methods of preparation are vacuum drying and freeze-drying which yields a powder of the active ingredient plus any additional desired ingredient from a previously sterile-filtered solution thereof.

[2530] Oral compositions generally include an inert diluent or an edible carrier. They can be enclosed in gelatin capsules or compressed into tablets. For the purpose of oral therapeutic administration, the active compound can be incorporated with excipients and used in the form of tablets, troches, or capsules. oral compositions can also be prepared using a fluid carrier for use as a mouthwash, wherein the compound in the fluid carrier is applied orally and swished and expectorated or swallowed. Pharmaceutically compatible binding agents, and/or adjuvant materials can be included as part of the composition. The tablets, pills, capsules, troches and the like can contain any of the following ingredients, or compounds of a similar nature: a binder such as microcrystalline cellulose, gum tragacanth or gelatin; an excipient such as starch or lactose, a disintegrating agent such as alginic acid, Primogel, or corn starch; a lubricant such as magnesium stearate or Sterotes; a glidant such as colloidal silicon dioxide; a sweetening agent such as sucrose or saccharin; or a flavoring agent such as peppermint, methyl salicylate, or orange flavoring.

[2531] For administration by inhalation, the compounds are delivered in the form of an aerosol spray from pressured container or dispenser which contains a suitable propellant, e.g., a gas such as carbon dioxide, or a nebulizer.

[2532] Systemic administration can also be by transmucosal or transdermal means. For transmucosal or transdermal administration, penetrants appropriate to the barrier to be permeated are used in the formulation. Such penetrants are generally known in the art, and include, for example, for transmucosal administration, detergents, bile salts, and fusidic acid derivatives. Transmucosal administration can be accomplished through the use of nasal sprays or suppositories. For transdermal administration, the active compounds are formulated into ointments, salves, gels, or creams as generally known in the art.

[2533] The compounds can also be prepared in the form of suppositories (e.g., with conventional suppository bases such as cocoa butter and other glycerides) or retention enemas for rectal delivery.

[2534] In one embodiment, the active compounds are prepared with carriers that will protect the compound against rapid elimination from the body, such as a controlled release formulation, including implants and microencapsulated delivery systems. Biodegradable, biocompatible polymers can be used, such as ethylene vinyl acetate, polyanhydrides, polyglycolic acid, collagen, polyorthoesters, and polylactic acid. Methods for preparation of such formulations will be apparent to those skilled in the art. The materials can also be obtained commercially from Alza Corporation and Nova Pharmaceuticals, Inc. Liposomal suspensions (including liposomes targeted to infected cells with monoclonal antibodies to viral antigens) can also be used as pharmaceutically acceptable carriers. These can be prepared according to methods known to those skilled in the art, for example, as described in U.S. Pat. No. 4,522,811.

[2535] It is especially advantageous to formulate oral or parenteral compositions in dosage unit form for ease of administration and uniformity of dosage. Dosage unit form as used herein refers to physically discrete units suited as unitary dosages for the subject to be treated; each unit containing a predetermined quantity of active compound calculated to produce the desired therapeutic effect in association with the required pharmaceutical carrier. The specification for the dosage unit forms of the invention are dictated by and directly dependent on the unique characteristics of the active compound and the particular therapeutic effect to be achieved, and the limitations inherent in the art of compounding such an active compound for the treatment of individuals.

[2536] Toxicity and therapeutic efficacy of such compounds can be determined by standard pharmaceutical procedures in cell cultures or experimental animals, e.g., for determining the LD50 (the dose lethal to 50% of the population) and the ED50 (the dose therapeutically effective in 50% of the population). The dose ratio between toxic and therapeutic effects is the therapeutic index and it can be expressed as the ratio LD50/ED50. Compounds which exhibit large therapeutic indices are preferred. While compounds that exhibit toxic side effects may be used, care should be taken to design a delivery system that targets such compounds to the site of affected tissue in order to minimize potential damage to uninfected cells and, thereby, reduce side effects.

[2537] The data obtained from the cell culture assays and animal studies can be used in formulating a range of dosage for use in humans. The dosage of such compounds lies preferably within a range of circulating concentrations that include the ED50 with little or no toxicity. The dosage may vary within this range depending upon the dosage form employed and the route of administration utilized. For any compound used in the method of the invention, the therapeutically effective dose can be estimated initially from cell culture assays. A dose may be formulated in animal models to achieve a circulating plasma concentration range that includes the IC50 (i.e., the concentration of the test compound which achieves a half-maximal inhibition of symptoms) as determined in cell culture. Such information can be used to more accurately determine useful doses in humans. Levels in plasma may be measured, for example, by high performance liquid chromatography.

[2538] As defined herein, a therapeutically effective amount of polypeptide (i.e., an effective dosage) ranges from about 0.001 to 30 mg/kg body weight, preferably about 0.01 to 25 mg/kg body weight, more preferably about 0.1 to 20 mg/kg body weight, and even more preferably about 1 to 10 mg/kg, 2 to 9 mg/kg, 3 to 8 mg/kg, 4 to 7 mg/kg, or 5 to 6 mg/kg body weight. The skilled artisan will appreciate that certain factors may influence the dosage required to effectively treat a subject, including but not limited to the severity of the disease or disorder, previous treatments, the general health and/or age of the subject, and other diseases present. Moreover, treatment of a subject with a therapeutically effective amount of a polypeptide or antibody can include a single treatment or, preferably, can include a series of treatments.

[2539] In a preferred example, a subject is treated with antibody or polypeptide in the range of between about 0.1 to 20 mg/kg body weight, one time per week for between about 1 to 10 weeks, preferably between 2 to 8 weeks, more preferably between about 3 to 7 weeks, and even more preferably for about 4, 5, or 6 weeks. It will also be appreciated that the effective dosage of antibody or polypeptide used for treatment may increase or decrease over the course of a particular treatment. Changes in dosage may result and become apparent from the results of diagnostic assays as described herein.

[2540] The present invention encompasses agents which modulate expression or activity. An agent may, for example, be a small molecule. For example, such small molecules include, but are not limited to, peptides, peptidomimetics, amino acids, amino acid analogs, polynucleotides, polynucleotide analogs, nucleotides, nucleotide analogs, organic or inorganic compounds (i.e.,. including heteroorganic and organometallic compounds) having a molecular weight less than about 10,000 grams per mole, organic or inorganic compounds having a molecular weight less than about 5,000 grams per mole, organic or inorganic compounds having a molecular weight less than about 1,000 grams per mole, organic or inorganic compounds having a molecular weight less than about 500 grams per mole, and salts, esters, and other pharmaceutically acceptable forms of such compounds. It is understood that appropriate doses of small molecule agents depends upon a number of factors within the ken of the ordinarily skilled physician, veterinarian, or researcher. The dose(s) of the small molecule will vary, for example, depending upon the identity, size, and condition of the subject or sample being treated, further depending upon the route by which the composition is to be administered, if applicable, and the effect which the practitioner desires the small molecule to have upon the nucleic acid or polypeptide of the invention.

[2541] Exemplary doses include milligram or microgram amounts of the small molecule per kilogram of subject or sample weight (e.g., about 1 microgram per kilogram to about 500 milligrams per kilogram, about 100 micrograms per kilogram to about 5 milligrams per kilogram, or about 1 microgram per kilogram to about 50 micrograms per kilogram. It is furthermore understood that appropriate doses of a small molecule depend upon the potency of the small molecule with respect to the expression or activity to be modulated. Such appropriate doses may be determined using the assays described herein. When one or more of these small molecules is to be administered to an animal (e.g., a human) in order to modulate expression or activity of a polypeptide or nucleic acid of the invention, a physician, veterinarian, or researcher may, for example, prescribe a relatively low dose at first, subsequently increasing the dose until an appropriate response is obtained. In addition, it is understood that the specific dose level for any particular animal subject will depend upon a variety of factors including the activity of the specific compound employed, the age, body weight, general health, gender, and diet of the subject, the time of administration, the route of administration, the rate of excretion, any drug combination, and the degree of expression or activity to be modulated.

[2542] Further, an antibody (or fragment thereof) may be conjugated to a therapeutic moiety such as a cytotoxin, a therapeutic agent or a radioactive metal ion. A cytotoxin or cytotoxic agent includes any agent that is detrimental to cells. Examples include taxol, cytochalasin B, gramicidin D, ethidium bromide, emetine, mitomycin, etoposide, tenoposide, vincristine, vinblastine, colchicin, doxorubicin, daunorubicin, dihydroxy anthracin dione, mitoxantrone, mithramycin, actinomycin D, 1-dehydrotestosterone, glucocorticoids, procaine, tetracaine, lidocaine, propranolol, and puromycin and analogs or homologues thereof. Therapeutic agents include, but are not limited to, antimetabolites (e.g., methotrexate, 6-mercaptopurine, 6-thioguanine, cytarabine, 5-fluorouracil decarbazine), alkylating agents (e.g., mechlorethamine, thioepa chlorambucil, melphalan, carmustine (BSNU) and lomustine (CCNU), cyclothosphamide, busulfan, dibromomannitol, streptozotocin, mitomycin C, and cis-dichlorodiamine platinum (II) (DDP) cisplatin), anthracyclines (e.g., daunorubicin (formerly daunomycin) and doxorubicin), antibiotics (e.g., dactinomycin (formerly actinomycin), bleomycin, mithramycin, and anthramycin (AMC)), and anti-mitotic agents (e.g., vincristine and vinblastine).

[2543] The conjugates of the invention can be used for modifying a given biological response, the drug moiety is not to be construed as limited to classical chemical therapeutic agents. For example, the drug moiety may be a protein or polypeptide possessing a desired biological activity. Such proteins may include, for example, a toxin such as abrin, ricin A, pseudomonas exotoxin, or diphtheria toxin; a protein such as tumor necrosis factor, alpha-interferon, beta-interferon, nerve growth factor, platelet derived growth factor, tissue plasminogen activator; or, biological response modifiers such as, for example, lymphokines, interleukin-1 (“IL-1”), interleukin-2 (“IL-2”), interleukin-6 (“IL-6”), granulocyte macrophage colony stimulating factor (“GM-CSF”), granulocyte colony stimulating factor (“G-CSF”), or other growth factors.

[2544] Techniques for conjugating such therapeutic moiety to antibodies are well known, see, e.g., Arnon et al., “Monoclonal Antibodies For Immunotargeting Of Drugs In Cancer Therapy”, in Monoclonal Antibodies And Cancer Therapy, Reisfeld et al. (eds.), pp. 243-56 (Alan R. Liss, Inc. 1985); Hellstrom et al., “Antibodies For Drug Delivery”, in Controlled Drug Delivery (2nd Ed.), Robinson et al. (eds.), pp. 623-53 (Marcel Dekker, Inc. 1987); Thorpe, “Antibody Carriers Of Cytotoxic Agents In Cancer Therapy: A Review”, in Monoclonal Antibodies '84: Biological And Clinical Applications, Pinchera et al. (eds.), pp. 475-506 (1985); “Analysis, Results, And Future Prospective Of The Therapeutic Use Of Radiolabeled Antibody In Cancer Therapy”, in Monoclonal Antibodies For Cancer Detection And Therapy, Baldwin et al. (eds.), pp. 303-16 (Academic Press 1985), and Thorpe et al., “The Preparation And Cytotoxic Properties Of Antibody-Toxin Conjugates”, Immunol. Rev., 62:119-58 (1982). Alternatively, an antibody can be conjugated to a second antibody to form an antibody heteroconjugate as described by Segal in U.S. Pat. No. 4,676,980.

[2545] The nucleic acid molecules of the invention can be inserted into vectors and used as gene therapy vectors. Gene therapy vectors can be delivered to a subject by, for example, intravenous injection, local administration (see U.S. Pat. No. 5,328,470) or by stereotactic injection (see e.g., Chen et al. (1994) Proc. Natl. Acad. Sci. USA 91:3054-3057). The pharmaceutical preparation of the gene therapy vector can include the gene therapy vector in an acceptable diluent, or can comprise a slow release matrix in which the gene delivery vehicle is imbedded. Alternatively, where the complete gene delivery vector can be produced intact from recombinant cells, e.g., retroviral vectors, the pharmaceutical preparation can include one or more cells which produce the gene delivery system.

[2546] The pharmaceutical compositions can be included in a container, pack, or dispenser together with instructions for administration.

[2547] V. Uses and Methods of the Invention

[2548] The nucleic acid molecules, proteins, protein homologues, and antibodies described herein can be used in one or more of the following methods: a) screening assays; b) predictive medicine (e.g., diagnostic assays, prognostic assays, monitoring clinical trials, and pharmacogenetics); and c) methods of treatment (e.g., therapeutic and prophylactic). As described herein, an α₂δ-4 polypeptide of the invention has one or more of the following activities: (1) interaction with and/or modulation of another non-α₂δ-4 subunit; (2) interaction with and/or modulation of an α₁ calcium channel subunit; (3) modulation of the conductance of an α₁ calcium channel subunit; (4) interaction with and/or modulation of a non-α₂δ-4 delta subunit; (5) modulation of membrane excitability; (6) influencing the resting potential of membranes; (7) modulation of wave forms and frequencies of action potentials; (8) modulation of thresholds of excitation; (9) modulation of neurite outgrowth and synaptogenesis; (10) modulation of signal transduction; and (7) participation in nociception.

[2549] The isolated nucleic acid molecules of the invention can be used, for example, to express α₂δ-4 polypeptide (e.g., via a recombinant expression vector in a host cell in gene therapy applications), to detect α₂δ-4 mRNA (e.g., in a biological sample) or a genetic alteration in an α₂δ-4 gene, and to modulate α₂δ-4 activity, as described further below. The α₂δ-4 polypeptides can be used to treat disorders characterized by insufficient or excessive production of an α₂δ-4 substrate or production of α₂δ-4 inhibitors. In addition, the α₂δ-4 polypeptides can be used to screen for naturally occurring α₂δ-4 substrates, to screen for drugs or compounds which modulate α₂δ-4 activity, as well as to treat disorders characterized by insufficient or excessive production of α₂δ-4 polypeptide or production of α₂δ-4 polypeptide forms which have decreased, aberrant or unwanted activity compared to α₂δ-4 wild type polypeptide. Moreover, the anti-α₂δ-4 antibodies of the invention can be used to detect and isolate α₂δ-4 polypeptides, to regulate the bioavailability of α₂δ-4 polypeptides, and modulate α₂δ-4 activity.

[2550] Examples of ion channel associated disorders include CNS disorders, such as cognitive and neurodegenerative disorders, examples of which include, but are not limited to, Alzheimer's disease, dementias related to Alzheimer's disease (such as Pick's disease), Parkinson's and other Lewy diffuse body diseases, senile dementia, Huntington's disease, Gilles de la Tourette's syndrome, multiple sclerosis, amyotrophic lateral sclerosis, progressive supranuclear palsy, epilepsy, Creutzfeldt-Jakob disease, or AIDS related dementia; autonomic function disorders such as hypertension and sleep disorders, and neuropsychiatric disorders, such as depression, schizophrenia, schizoaffective disorder, korsakoff's psychosis, mania, anxiety disorders, or phobic disorders; leaning or memory disorders, e.g., amnesia or age-related memory loss, attention deficit disorder, psychoactive substance use disorders, anxiety, phobias, panic disorder, as well as bipolar affective disorder, e.g., severe bipolar affective (mood) disorder (BP-1), and bipolar affective neurological disorders, e.g., migraine and obesity. Further CNS-related disorders include, for example, those listed in the American Psychiatric Association's Diagnostic and Statistical manual of Mental Disorders (DSM), the most current version of which is incorporated herein by reference in its entirety.

[2551] Ion channel associated disorders include pain disorders. Pain disorders include those that affect pain signaling mechanisms. As used herein, the term “pain signaling mechanisms” includes the cellular mechanisms involved in the development and regulation of pain, e.g., pain elicited by noxious chemical, mechanical, or thermal stimuli, in a subject, e.g., a mammal such as a human. In mammals, the initial detection of noxious chemical, mechanical, or thermal stimuli, a process referred to as “nociception”, occurs predominantly at the peripheral terminals of specialized, small diameter sensory neurons. These sensory neurons transmit the information to the central nervous system, evoking a perception of pain or discomfort and initiating appropriate protective reflexes. The α₂δ-4 molecules of the present invention may be present on these sensory neurons and, thus, may be involved in detecting these noxious chemical, mechanical, or thermal stimuli and transducing this information into membrane depolarization events. Thus, the α₂δ-4 molecules by participating in pain signaling mechanisms, may modulate pain elicitation and act as targets for developing novel diagnostic targets and therapeutic agents to control pain.

[2552] Ion channel associated disorders include cellular proliferation, growth, differentiation, or migration disorders. Cellular proliferation, growth, differentiation, or migration disorders include those disorders that affect cell proliferation, growth, differentiation, or migration processes. As used herein, a “cellular proliferation, growth, differentiation, or migration process” is a process by which a cell increases in number, size or content, by which a cell develops a specialized set of characteristics which differ from that of other cells, or by which a cell moves closer to or further from a particular location or stimulus. The α₂δ-4 molecules of the present invention are involved in signal transduction mechanisms, which are known to be involved in cellular growth, differentiation, and migration processes. Thus, the α₂δ-4 molecules may modulate cellular growth, differentiation, or migration, and may play a role in disorders characterized by aberrantly regulated growth, differentiation, or migration. Such disorders include cancer, e.g., carcinoma, sarcoma, or leukemia; tumor angiogenesis and metastasis; skeletal dysplasia; neuronal deficiencies resulting from impaired neural induction and patterning; hepatic disorders; cardiovascular disorders; and hematopoietic and/or myeloproliferative disorders.

[2553] Preferred α₂δ-4 associated disorders are those associated with aberrant voltage-gated calcium channel activity. Examples of such disorders include angina, atrial fibrillation and flutter, hypertension, peripheral vascular disorders (e.g., Raynaud's), and cerebral vasospasm. Other examples of α₂δ-4 associated disorders are described herein. In addition, the α₂δ-4 polypeptides can be used to screen for naturally occurring α₂δ-4 substrates, to screen for drugs or compounds which modulate α₂δ-4 activity, as well as to treat disorders characterized by insufficient or excessive production of α₂δ-4 polypeptide or production of α₂δ-4 polypeptide forms which have decreased, aberrant or unwanted activity compared to α₂δ-4 wild type polypeptide (such as cell permeabilization, cell necrosis or apoptosis, triggering of second messengers, cell proliferation, cell motility, or signal transduction disorders). Moreover, the anti-α₂δ-4 antibodies of the invention can be used to detect and isolate α₂δ-4 polypeptides, to regulate the bioavailability of α₂δ-4 polypeptides, and modulate α₂δ-4 activity.

[2554] A. Screening Assays:

[2555] The invention provides a method (also referred to herein as a “screening assay”) for identifying modulators, i.e., candidate or test compounds or agents (e.g., peptides, peptidomimetics, small molecules or other drugs) which bind to α₂δ-4 polypeptides, have a stimulatory or inhibitory effect on, for example, α₂δ-4 expression or α₂δ-4 activity, or have a stimulatory or inhibitory effect on, for example, the expression or activity of α₂δ-4 substrate.

[2556] In one embodiment, the invention provides assays for screening candidate or test compounds which are substrates of an α₂δ-4 polypeptide or polypeptide or biologically active portion thereof. In another embodiment, the invention provides assays for screening candidate or test compounds which bind to or modulate the activity of an α₂δ-4 polypeptide or polypeptide or biologically active portion thereof. The test compounds of the present invention can be obtained using any of the numerous approaches in combinatorial library methods known in the art, including: biological libraries; spatially addressable parallel solid phase or solution phase libraries; synthetic library methods requiring deconvolution; the ‘one-bead one-compound’ library method; and synthetic library methods using affinity chromatography selection. The biological library approach is limited to peptide libraries, while the other four approaches are applicable to peptide, non-peptide oligomer or small molecule libraries of compounds (Lam, K. S. (1997) Anticancer Drug Des. 12:145).

[2557] Examples of methods for the synthesis of molecular libraries can be found in the art, for example in: DeWitt et al. (1993) Proc. Natl Acad. Sci. U.S.A. 90:6909; Erb et al. (1994) Proc. Natl. Acad. Sci. USA 91:11422; Zuckermann et al. (1994). J. Med. Chem. 37:2678; Cho et al. (1993) Science 261:1303; Carrell et al. (1994) Angew. Chem. Int. Ed. Engl. 33:2059; Carell et al. (1994) Angew. Chem. Int. Ed. Engl. 33:2061; and in Gallop et al. (1994) J. Med. Chem. 37:1233.

[2558] Libraries of compounds may be presented in solution (e.g., Houghten (1992) Biotechniques 13:412-421), or on beads (Lam (1991) Nature 354:82-84), chips (Fodor (1993) Nature 364:555-556), bacteria (Ladner U.S. Pat. No. 5,223,409), spores (Ladner U.S. Pat. No. '409), plasmids (Cull et al. (1992) Proc Natl Acad Sci USA 89:1865-1869) or on phage (Scott and Smith (1990) Science 249:386-390); (Devlin (1990) Science 249:404-406); (Cwirla et al. (1990) Proc. Natl. Acad. Sci. 87:6378-6382); (Felici (1991) J. Mol. Biol. 222:301-310); (Ladner supra.).

[2559] In one embodiment, an assay is a cell-based assay in which a cell which expresses an α₂δ-4 polypeptide or biologically active portion thereof is contacted with a test compound and the ability of the test compound to modulate voltage-gated calcium channel activity is determined. Determining the ability of the test compound to modulate voltage-gated calcium channel activity can be accomplished by monitoring, for example, intracellular calcium, IP3, or diacylglycerol concentration, phosphorylation profile of intracellular proteins, or the activity of a voltage-gated calcium channel-regulated transcription factor. The cell, for example, can be of mammalian origin, e.g., a neuronal cell, a muscle cell or a neuroendocrine cell.

[2560] The ability of the test compound to modulate α₂δ-4 binding to a substrate or to bind to α₂δ-4 can also be determined. Determining the ability of the test compound to modulate α₂δ-4 binding to a substrate can be accomplished, for example, by coupling the α₂δ-4 substrate with a radioisotope or enzymatic label such that binding of the α₂δ-4 substrate to α₂δ-4 can be determined by detecting the labeled α₂δ-4 substrate in a complex. Alternatively, α₂δ-4 could be coupled with a radioisotope or enzymatic label to monitor the ability of a test compound to modulate α₂δ-4 binding to an α₂δ-4 substrate in a complex. Determining the ability of the test compound to bind α₂δ-4 can be accomplished, for example, by coupling the compound with a radioisotope or enzymatic label such that binding of the compound to α₂δ-4 can be determined by detecting the labeled α₂δ-4 compound in a complex. For example, compounds (e.g., α₂δ-4 substrates) can be labeled with ¹²⁵I, ³⁵S, ¹⁴C, or ³H, either directly or indirectly, and the radioisotope detected by direct counting of radioemission or by scintillation counting. Alternatively, compounds can be enzymatically labeled with, for example, horseradish peroxidase, alkaline phosphatase, or luciferase, and the enzymatic label detected by determination of conversion of an appropriate substrate to product.

[2561] It is also within the scope of this invention to determine the ability of a compound (e.g., an α₂δ-4 substrate) to interact with α₂δ-4 without the labeling of any of the interactants. For example, a microphysiometer can be used to detect the interaction of a compound with α₂δ-4 without the labeling of either the compound or the α₂δ-4. McConnell, H. M. et al. (1992) Science 257:1906-1912. As used herein, a “microphysiometer” (e.g., Cytosensor) is an analytical instrument that measures the rate at which a cell acidifies its environment using a light-addressable potentiometric sensor (LAPS). Changes in this acidification rate can be used as an indicator of the interaction between a compound and α₂δ-4.

[2562] In another embodiment, an assay is a cell-based assay comprising contacting a cell expressing an α₂δ-4 target molecule (e.g., an α₂δ-4 substrate) with a test compound and determining the ability of the test compound to modulate (e.g., stimulate or inhibit) the activity of the α₂δ-4 target molecule. Determining the ability of the test compound to modulate the activity of an α₂δ-4 target molecule can be accomplished, for example, by determining the ability of the α₂δ-4 polypeptide to bind to or interact with the α₂δ-4 target molecule.

[2563] Determining the ability of the α₂δ-4 polypeptide, or a biologically active fragment thereof, to bind to or interact with an α₂δ-4 target molecule can be accomplished by one of the methods described above for determining direct binding. In a preferred embodiment, determining the ability of the α₂δ-4 polypeptide to bind to or interact with an α₂δ-4 target molecule can be accomplished by determining the activity of the target molecule. For example, the activity of the target molecule can be determined by detecting induction of a cellular second messenger of the target (i.e., intracellular Ca²⁺, diacylglycerol, IP₃, and the like), detecting catalytic/enzymatic activity of the target using an appropriate substrate, detecting the induction of a reporter gene (comprising a target-responsive regulatory element operatively linked to a nucleic acid encoding a detectable marker, e.g., luciferase), or detecting a target-regulated cellular response.

[2564] In yet another embodiment, an assay of the present invention is a cell-free assay in which an α₂δ-4 polypeptide or biologically active portion thereof is contacted with a test compound and the ability of the test compound to bind to the α₂δ-4 polypeptide or biologically active portion thereof is determined. Preferred biologically active portions of the α₂δ-4 polypeptides to be used in assays of the present invention include fragments which participate in interactions with non-α₂δ-4 molecules, e.g., fragments with high surface probability scores (see, for example, FIG. 42). Binding of the test compound to the α₂δ-4 polypeptide can be determined either directly or indirectly as described above. In a preferred embodiment, the assay includes contacting the α₂δ-4 polypeptide or biologically active portion thereof with a known compound which binds α₂δ-4 to form an assay mixture, contacting the assay mixture with a test compound, and determining the ability of the test compound to interact with an α₂δ-4 polypeptide, wherein determining the ability of the test compound to interact with an α₂δ-4 polypeptide comprises determining the ability of the test compound to preferentially bind to α₂δ-4 or biologically active portion thereof as compared to the known compound.

[2565] In another embodiment, the assay is a cell-free assay in which an α₂δ-4 polypeptide or biologically active portion thereof is contacted with a test compound and the ability of the test compound to modulate (e.g., stimulate or inhibit) the activity of the α₂δ-4 polypeptide or biologically active portion thereof is determined. Determining the ability of the test compound to modulate the activity of an α₂δ-4 polypeptide can be accomplished, for example, by determining the ability of the α₂δ-4 polypeptide to bind to an α₂δ-4 target molecule by one of the methods described above for determining direct binding. Determining the ability of the α₂δ-4 polypeptide to bind to an α₂δ-4 target molecule can also be accomplished using a technology such as real-time Biomolecular Interaction Analysis (BIA). Sjolander, S. and Urbaniczky, C. (1991) Anal. Chem. 63:2338-2345 and Szabo et al. (1995) Curr. Opin. Struct. Biol. 5:699-705. As used herein, “BIA” is a technology for studying biospecific interactions in real time, without labeling any of the interactants (e.g., BIAcore). Changes in the optical phenomenon of surface plasmon resonance (SPR) can be used as an indication of real-time reactions between biological molecules.

[2566] In an alternative embodiment, determining the ability of the test compound to modulate the activity of an α₂δ-4 polypeptide can be accomplished by determining the ability of the α₂δ-4 polypeptide to further modulate the activity of a downstream effector of an α₂δ-4 target molecule. For example, the activity of the effector molecule on an appropriate target can be determined or the binding of the effector to an appropriate target can be determined as previously described.

[2567] In yet another embodiment, the cell-free assay involves contacting an α₂δ-4 polypeptide or biologically active portion thereof with a known compound which binds the α₂δ-4 polypeptide to form an assay mixture, contacting the assay mixture with a test compound, and determining the ability of the test compound to interact with the α₂δ-4 polypeptide, wherein determining the ability of the test compound to interact with the α₂δ-4 polypeptide comprises determining the ability of the α₂δ-4 polypeptide to preferentially bind to or modulate the activity of an α₂δ-4 target molecule.

[2568] In more than one embodiment of the above assay methods of the present invention, it may be desirable to immobilize either α₂δ-4 or its target molecule to facilitate separation of complexed from uncomplexed forms of one or both of the proteins, as well as to accommodate automation of the assay. Binding of a test compound to an α₂δ-4 polypeptide, or interaction of an α₂δ-4 polypeptide with a target molecule in the presence and absence of a candidate compound, can be accomplished in any vessel suitable for containing the reactants. Examples of such vessels include microtiter plates, test tubes, and micro-centrifuge tubes. In one embodiment, a fusion protein can be provided which adds a domain that allows one or both of the proteins to be bound to a matrix. For example, glutathione-S-transferase/α₂δ-4 fusion proteins or glutathione-S-transferase/target fusion proteins can be adsorbed onto glutathione sepharose beads (Sigma Chemical, St. Louis, Mo.) or glutathione derivatized micrometer plates, which are then combined with the test compound or the test compound and either the non-adsorbed target protein or α₂δ-4 polypeptide, and the mixture incubated under conditions conducive to complex formation (e.g., at physiological conditions for salt and pH). Following incubation, the beads or micrometer plate wells are washed to remove any unbound components, the matrix immobilized in the case of beads, complex determined either directly or indirectly, for example, as described above. Alternatively, the complexes can be dissociated from the matrix, and the level of α₂δ-4 binding or activity determined using standard techniques.

[2569] Other techniques for immobilizing proteins on matrices can also be used in the screening assays of the invention. For example, either an α₂δ-4 polypeptide or an α₂δ-4 target molecule can be immobilized utilizing conjugation of biotin and streptavidin. Biotinylated α₂δ-4 polypeptide or target molecules can be prepared from biotin-NHS (N-hydroxy-succinimide) using techniques known in the art (e.g., biotinylation kit, Pierce Chemicals, Rockford, Ill.), and immobilized in the wells of streptavidin-coated 96 well plates (Pierce Chemical). Alternatively, antibodies reactive with α₂δ-4 polypeptide or target molecules but which do not interfere with binding of the α₂δ-4 polypeptide to its target molecule can be derivatized to the wells of the plate, and unbound target or α₂δ-4 polypeptide trapped in the wells by antibody conjugation. Methods for detecting such complexes, in addition to those described above for the GST-immobilized complexes, include immunodetection of complexes using antibodies reactive with the α₂δ-4 polypeptide or target molecule, as well as enzyme-linked assays which rely on detecting an enzymatic activity associated with the α₂δ-4 polypeptide or target molecule.

[2570] In another embodiment, modulators of α₂δ-4 expression are identified in a method wherein a cell is contacted with a candidate compound and the expression of α₂δ-4 mRNA or polypeptide in the cell is determined. The level of expression of α₂δ-4 mRNA or polypeptide in the presence of the candidate compound is compared to the level of expression of α₂δ-4 mRNA or polypeptide in the absence of the candidate compound. The candidate compound can then be identified as a modulator of α₂δ-4 expression based on this comparison. For example, when expression of α₂δ-4 mRNA or polypeptide is greater (statistically significantly greater) in the presence of the candidate compound than in its absence, the candidate compound is identified as a stimulator of α₂δ-4 mRNA or polypeptide expression. Alternatively, when expression of α₂δ-4 mRNA or polypeptide is less (statistically significantly less) in the presence of the candidate compound than in its absence, the candidate compound is identified as an inhibitor of α₂δ-4 mRNA or polypeptide expression. The level of α₂δ-4 mRNA or polypeptide expression in the cells can be determined by methods described herein for detecting α₂δ-4 mRNA or polypeptide.

[2571] In yet another aspect of the invention, the α₂δ-4 polypeptides can be used as “bait proteins” in a two-hybrid assay or three-hybrid assay (see, e.g., U.S. Pat. No. 5,283,317; Zervos et al. (1993) i Cell 72:223-232; Madura et al. (1993) J. Biol. Chem. 268:12046-12054; Bartel et al. (1993) Biotechniques 14:920-924; Iwabuchi et al. (1993) Oncogene 8:1693-1696; and Brent WO94/10300), to identify other proteins, which bind to or interact with α₂δ-4 (“α₂δ-4-binding proteins” or “α₂δ-4-bp”) and are involved in α₂δ-4 activity. Such α₂δ-4-binding proteins are also likely to be involved in the propagation of signals by the α₂δ-4 polypeptides or α₂δ-4 targets as, for example, downstream elements of an α₂δ-4-mediated signaling pathway. Alternatively, such α₂δ-4-binding proteins are likely to be α₂δ-4 inhibitors.

[2572] The two-hybrid system is based on the modular nature of most transcription factors, which consist of separable DNA-binding and activation domains. Briefly, the assay utilizes two different DNA constructs. In one construct, the gene that codes for an α₂δ-4 polypeptide is fused to a gene encoding the DNA binding domain of a known transcription factor (e.g., GAL-4). In the other construct, a DNA sequence, from a library of DNA sequences, that encodes an unidentified protein (“prey” or “sample”) is fused to a gene that codes for the activation domain of the known transcription factor. If the “bait” and the “prey” proteins are able to interact, in vivo, forming an α₂δ-4-dependent complex, the DNA-binding and activation domains of the transcription factor are brought into close proximity. This proximity allows transcription of a reporter gene (e.g., LacZ) which is operably linked to a transcriptional regulatory site responsive to the transcription factor. Expression of the reporter gene can be detected and cell colonies containing the functional transcription factor can be isolated and used to obtain the cloned gene which encodes the protein which interacts with the α₂δ-4 polypeptide.

[2573] In another aspect, the invention pertains to a combination of two or more of the assays described herein. For example, a modulating agent can be identified using a cell-based or a cell free assay, and the ability of the agent to modulate the activity of an α₂δ-4 polypeptide can be confirmed in vivo, e.g., in an animal such as an animal model for cellular transformation and/or tumorigenesis.

[2574] This invention further pertains to novel agents identified by the above-described screening assays. Accordingly, it is within the scope of this invention to further use an agent identified as described herein in an appropriate animal model. For example, an agent identified as described herein (e.g., an α₂δ-4 modulating agent, an antisense α₂δ-4 nucleic acid molecule, an α₂δ-4-specific antibody, or an α₂δ-4-binding partner) can be used in an animal model to determine the efficacy, toxicity, or side effects of treatment with such an agent. Alternatively, an agent identified as described herein can be used in an animal model to determine the mechanism of action of such an agent. Furthermore, this invention pertains to uses of novel agents identified by the above-described screening assays for treatments as described herein.

[2575] B. Detection Assays

[2576] Portions or fragments of the cDNA sequences identified herein (and the corresponding complete gene sequences) can be used in numerous ways as polynucleotide reagents. For example, these sequences can be used to: (i) map their respective genes on a chromosome; and, thus, locate gene regions associated with genetic disease; (ii) identify an individual from a minute biological sample (tissue typing); and (iii) aid in forensic identification of a biological sample. These applications are described in the subsections below.

[2577] 1. Chromosome Mapping

[2578] Once the sequence (or a portion of the sequence) of a gene has been isolated, this sequence can be used to map the location of the gene on a chromosome. This process is called chromosome mapping. Accordingly, portions or fragments of the α₂δ-4 nucleotide sequences, described herein, can be used to map the location of the α₂δ-4 genes on a chromosome. The mapping of the α₂δ-4 sequences to chromosomes is an important first step in correlating these sequences with genes associated with disease.

[2579] Briefly, α₂δ-4 genes can be mapped to chromosomes by preparing PCR primers (preferably 15-25 bp in length) from the α₂δ-4 nucleotide sequences. Computer analysis of the α₂δ-4 sequences can be used to predict primers that do not span more than one exon in the genomic DNA, thus complicating the amplification process. These primers can then be used for PCR screening of somatic cell hybrids containing individual human chromosomes. Only those hybrids containing the human gene corresponding to the α₂δ-4 sequences will yield an amplified fragment.

[2580] Somatic cell hybrids are prepared by fusing somatic cells from different mammals (e.g., human and mouse cells). As hybrids of human and mouse cells grow and divide, they gradually lose human chromosomes in random order, but retain the mouse chromosomes. By using media in which mouse cells cannot grow, because they lack a particular enzyme, but human cells can, the one human chromosome that contains the gene encoding the needed enzyme, will be retained. By using various media, panels of hybrid cell lines can be established. Each cell line in a panel contains either a single human chromosome or a small number of human chromosomes, and a full set of mouse chromosomes, allowing easy mapping of individual genes to specific human chromosomes. (D'Eustachio P. et al. (1983) Science 220:919-924). Somatic cell hybrids containing only fragments of human chromosomes can also be produced by using human chromosomes with translocations and deletions.

[2581] PCR mapping of somatic cell hybrids is a rapid procedure for assigning a particular sequence to a particular chromosome. Three or more sequences can be assigned per day using a single thermal cycler. Using the α₂δ-4 nucleotide sequences to design oligonucleotide primers, sublocalization can be achieved with panels of fragments from specific chromosomes. Other mapping strategies which can similarly be used to map an α₂δ-4 sequence to its chromosome include in situ hybridization (described in Fan, Y. et al. (1990) Proc. Natl. Acad. Sci. USA, 87:6223-27), pre-screening with labeled flow-sorted chromosomes, and pre-selection by hybridization to chromosome specific cDNA libraries.

[2582] Fluorescence in situ hybridization (FISH) of a DNA sequence to a metaphase chromosomal spread can further be used to provide a precise chromosomal location in one step. Chromosome spreads can be made using cells whose division has been blocked in metaphase by a chemical such as colcemid that disrupts the mitotic spindle. The chromosomes can be treated briefly with trypsin, and then stained with Giemsa. A pattern of light and dark bands develops on each chromosome, so that the chromosomes can be identified individually. The FISH technique can be used with a DNA sequence as short as 500 or 600 bases. However, clones larger than 1,000 bases have a higher likelihood of binding to a unique chromosomal location with sufficient signal intensity for simple detection. Preferably 1,000 bases, and more preferably 2,000 bases will suffice to get good results at a reasonable amount of time. For a review of this technique, see Verma et al., Human Chromosomes: A Manual of Basic Techniques (Pergamon Press, New York 1988).

[2583] Reagents for chromosome mapping can be used individually to mark a single chromosome or a single site on that chromosome, or panels of reagents can be used for marking multiple sites and/or multiple chromosomes. Reagents corresponding to noncoding regions of the genes actually are preferred for mapping purposes. Coding sequences are more likely to be conserved within gene families, thus increasing the chance of cross hybridizations during chromosomal mapping.

[2584] Once a sequence has been mapped to a precise chromosomal location, the physical position of the sequence on the chromosome can be correlated with genetic map data. (Such data are found, for example, in V. McKusick, Mendelian Inheritance in Man, available on-line through Johns Hopkins University Welch Medical Library). The relationship between a gene and a disease, mapped to the same chromosomal region, can then be identified through linkage analysis (co-inheritance of physically adjacent genes), described in, for example, Egeland, J. et al. (1987) Nature, 325:783-787.

[2585] Moreover, differences in the DNA sequences between individuals affected and unaffected with a disease associated with the α₂δ-4 gene, can be determined. If a mutation is observed in some or all of the affected individuals but not in any unaffected individuals, then the mutation is likely to be the causative agent of the particular disease. Comparison of affected and unaffected individuals generally involves first looking for structural alterations in the chromosomes, such as deletions or translocations that are visible from chromosome spreads or detectable using PCR based on that DNA sequence. Ultimately, complete sequencing of genes from several individuals can be performed to confirm the presence of a mutation and to distinguish mutations from polymorphisms.

[2586] 2. Tissue Typing

[2587] The α₂δ-4 sequences of the present invention can also be used to identify individuals from minute biological samples. The United States military, for example, is considering the use of restriction fragment length polymorphism (RFLP) for identification of its personnel. In this technique, an individual's genomic DNA is digested with one or more restriction enzymes, and probed on a Southern blot to yield unique bands for identification. This method does not suffer from the current limitations of “Dog Tags” which can be lost, switched, or stolen, making positive identification difficult. The sequences of the present invention are useful as additional DNA markers for RFLP (described in U.S. Pat. No. 5,272,057).

[2588] Furthermore, the sequences of the present invention can be used to provide an alternative technique which determines the actual base-by-base DNA sequence of selected portions of an individual's genome. Thus, the α₂δ-4 nucleotide sequences described herein can be used to prepare two PCR primers from the 5′ and 3′ ends of the sequences. These primers can then be used to amplify an individual's DNA and subsequently sequence it.

[2589] Panels of corresponding DNA sequences from individuals, prepared in this manner, can provide unique individual identifications, as each individual will have a unique set of such DNA sequences due to allelic differences. The sequences of the present invention can be used to obtain such identification sequences from individuals and from tissue. The α₂δ-4 nucleotide sequences of the invention uniquely represent portions of the human genome. Allelic variation occurs to some degree in the coding regions of these sequences, and to a greater degree in the noncoding regions. It is estimated that allelic variation between individual humans occurs with a frequency of about once per each 500 bases. Each of the sequences described herein can, to some degree, be used as a standard against which DNA from an individual can be compared for identification purposes. Because greater numbers of polymorphisms occur in the noncoding regions, fewer sequences are necessary to differentiate individuals. The noncoding sequences of SEQ ID NO:1 can comfortably provide positive individual identification with a panel of perhaps 10 to 1,000 primers which each yield a noncoding amplified sequence of 100 bases. If predicted coding sequences, such as those in SEQ ID NO:3 are used, a more appropriate number of primers for positive individual identification would be 500-2,000.

[2590] If a panel of reagents from α₂δ-4 nucleotide sequences described herein is used to generate a unique identification database for an individual, those same reagents can later be used to identify tissue from that individual. Using the unique identification database, positive identification of the individual, living or dead, can be made from extremely small tissue samples.

[2591] 3. Use of α₂δ-4 Sequences in Forensic Biology

[2592] DNA-based identification techniques can also be used in forensic biology. Forensic biology is a scientific field employing genetic typing of biological evidence found at a crime scene as a means for positively identifying, for example, a perpetrator of a crime. To make such an identification, PCR technology can be used to amplify DNA sequences taken from very small biological samples such as tissues, e.g., hair or skin, or body fluids, e.g., blood, saliva, or semen found at a crime scene. The amplified sequence can then be compared to a standard, thereby allowing identification of the origin of the biological sample.

[2593] The sequences of the present invention can be used to provide polynucleotide reagents, e.g., PCR primers, targeted to specific loci in the human genome, which can enhance the reliability of DNA-based forensic identifications by, for example, providing another “identification marker” (i.e. another DNA sequence that is unique to a particular individual). As mentioned above, actual base sequence information can be used for identification as an accurate alternative to patterns formed by restriction enzyme generated fragments. Sequences targeted to noncoding regions of SEQ ID NO:1 are particularly appropriate for this use as greater numbers of polymorphisms occur in the noncoding regions, making it easier to differentiate individuals using this technique. Examples of polynucleotide reagents include the α₂δ-4 nucleotide sequences or portions thereof, e.g., fragments derived from the noncoding regions of SEQ ID NO:1 having a length of at least 20 bases, preferably at least 30 bases.

[2594] The α₂δ-4 nucleotide sequences described herein can further be used to provide polynucleotide reagents, e.g., labeled or labelable probes which can be used in, for example, an in situ hybridization technique, to identify a specific tissue, e.g., brain tissue. This can be very useful in cases where a forensic pathologist is presented with a tissue of unknown origin. Panels of such α₂δ-4 probes can be used to identify tissue by species and/or by organ type.

[2595] In a similar fashion, these reagents, e.g., α₂δ-4 primers or probes can be used to screen tissue culture for contamination (i.e. screen for the presence of a mixture of different types of cells in a culture).

[2596] C. Predictive Medicine:

[2597] The present invention also pertains to the field of predictive medicine in which diagnostic assays, prognostic assays, and monitoring clinical trials are used for prognostic (predictive) purposes to thereby treat an individual prophylactically. Accordingly, one aspect of the present invention relates to diagnostic assays for determining α₂δ-4 polypeptide and/or nucleic acid expression as well as α₂δ-4 activity, in the context of a biological sample (e.g., blood, serum, cells, tissue) to thereby determine whether an individual is afflicted with a disease or disorder, or is at risk of developing a disorder, associated with aberrant or unwanted α₂δ-4 expression or activity. The invention also provides for prognostic (or predictive) assays for determining whether an individual is at risk of developing a disorder associated with α₂δ-4 polypeptide, nucleic acid expression or activity. For example, mutations in an α₂δ-4 gene can be assayed in a biological sample. Such assays can be used for prognostic or predictive purpose to thereby prophylactically treat an individual prior to the onset of a disorder characterized by or associated with α₂δ-4 polypeptide, nucleic acid expression or activity.

[2598] Another aspect of the invention pertains to monitoring the influence of agents (e.g., drugs, compounds) on the expression or activity of α₂δ-4 in clinical trials.

[2599] These and other agents are described in further detail in the following sections.

[2600] 1. Diagnostic Assays

[2601] An exemplary method for detecting the presence or absence of α₂δ-4 polypeptide or nucleic acid in a biological sample involves obtaining a biological sample from a test subject and contacting the biological sample with a compound or an agent capable of detecting α₂δ-4 polypeptide or nucleic acid (e.g., mRNA, or genomic DNA) that encodes α₂δ-4 polypeptide such that the presence of α₂δ-4 polypeptide or nucleic acid is detected in the biological sample. In another aspect, the present invention provides a method for detecting the presence of α₂δ-4 activity in a biological sample by contacting the biological sample with an agent capable of detecting an indicator of α₂δ-4 activity such that the presence of α₂δ-4 activity is detected in the biological sample. A preferred agent for detecting α₂δ-4 mRNA or genomic DNA is a labeled nucleic acid probe capable of hybridizing to α₂δ-4 mRNA or genomic DNA. The nucleic acid probe can be, for example, the α₂δ-4 nucleic acid set forth in SEQ ID NO:43 or 45, or the DNA insert of the plasmid deposited with ATCC as Accession Number ______, or a portion thereof, such as an oligonucleotide of at least 15, 30, 50, 100, 250 or 500 nucleotides in length and sufficient to specifically hybridize under stringent conditions to α₂δ-4 mRNA or genomic DNA. Other suitable probes for use in the diagnostic assays of the invention are described herein.

[2602] A preferred agent for detecting α₂δ-4 polypeptide is an antibody capable of binding to α₂δ-4 polypeptide, preferably an antibody with a detectable label. Antibodies can be polyclonal, or more preferably, monoclonal. An intact antibody, or a fragment thereof (e.g., Fab or F(ab′)₂) can be used. The term “labeled”, with regard to the probe or antibody, is intended to encompass direct labeling of the probe or antibody by coupling (i.e., physically linking) a detectable substance to the probe or antibody, as well as indirect labeling of the probe or antibody by reactivity with another reagent that is directly labeled. Examples of indirect labeling include detection of a primary antibody using a fluorescently labeled secondary antibody and end-labeling of a DNA probe with biotin such that it can be detected with fluorescently labeled streptavidin. The term “biological sample” is intended to include tissues, cells and biological fluids isolated from a subject, as well as tissues, cells and fluids present within a subject. That is, the detection method of the invention can be used to detect α₂δ-4 mRNA, polypeptide, or genomic DNA in a biological sample in vitro as well as in vivo. For example, in vitro techniques for detection of α₂δ-4 mRNA include Northern hybridizations and in situ hybridizations. In vitro techniques for detection of α₂δ-4 polypeptide include enzyme linked immunosorbent assays (ELISAs), Western blots, immunoprecipitations and immunofluorescence. In vitro techniques for detection of α₂δ-4 genomic DNA include Southern hybridizations. Furthermore, in vivo techniques for detection of α₂δ-4 polypeptide include introducing into a subject a labeled anti-α₂δ-4 antibody. For example, the antibody can be labeled with a radioactive marker whose presence and location in a subject can be detected by standard imaging techniques.

[2603] The present invention also provides diagnostic assays for identifying the presence or absence of a genetic alteration characterized by at least one of (i) aberrant modification or mutation of a gene encoding an α₂δ-4 polypeptide; (ii) aberrant expression of a gene encoding an α₂δ-4 polypeptide; (iii) mis-regulation of the gene; and (iii) aberrant post-translational modification of an α₂δ-4 polypeptide, wherein a wild-type form of the gene encodes a polypeptide with an α₂δ-4 activity. “Misexpression or aberrant expression”, as used herein, refers to a non-wild type pattern of gene expression, at the RNA or protein level. It includes, but is not limited to, expression at non-wild type levels (e.g., over or under expression); a pattern of expression that differs from wild type in terms of the time or stage at which the gene is expressed (e.g., increased or decreased expression (as compared with wild type) at a predetermined developmental period or stage); a pattern of expression that differs from wild type in terms of decreased expression (as compared with wild type) in a predetermined cell type or tissue type; a pattern of expression that differs from wild type in terms of the splicing size, amino acid sequence, post-transitional modification, or biological activity of the expressed polypeptide; a pattern of expression that differs from wild type in terms of the effect of an environmental stimulus or extracellular stimulus on expression of the gene (e.g., a pattern of increased or decreased expression (as compared with wild type) in the presence of an increase or decrease in the strength of the stimulus).

[2604] In one embodiment, the biological sample contains protein molecules from the test subject. Alternatively, the biological sample can contain mRNA molecules from the test subject or genomic DNA molecules from the test subject. A preferred biological sample is a serum sample isolated by conventional means from a subject.

[2605] In another embodiment, the methods further involve obtaining a control biological sample from a control subject, contacting the control sample with a compound or agent capable of detecting α₂δ-4 polypeptide, mRNA, or genomic DNA, such that the presence of α₂δ-4 polypeptide, mRNA or genomic DNA is detected in the biological sample, and comparing the presence of α₂δ-4 polypeptide, mRNA or genomic DNA in the control sample with the presence of α₂δ-4 polypeptide, mRNA or genomic DNA in the test sample.

[2606] The invention also encompasses kits for detecting the presence of α₂δ-4 in a biological sample. For example, the kit can comprise a labeled compound or agent capable of detecting α₂δ-4 polypeptide or mRNA in a biological sample; means for determining the amount of α₂δ-4 in the sample; and means for comparing the amount of α₂δ-4 in the sample with a standard. The compound or agent can be packaged in a suitable container. The kit can further comprise instructions for using the kit to detect α₂δ-4 polypeptide or nucleic acid.

[2607] 2. Prognostic Assays

[2608] The diagnostic methods described herein can furthermore be utilized to identify subjects having or at risk of developing a disease or disorder associated with aberrant or unwanted α₂δ-4 expression or activity. As used herein, the term “aberrant” includes an α₂δ-4 expression or activity which deviates from the wild type α₂δ-4 expression or activity. Aberrant expression or activity includes increased or decreased expression or activity, as well as expression or activity which does not follow the wild type developmental pattern of expression or the subcellular pattern of expression. For example, aberrant α₂δ-4 expression or activity is intended to include the cases in which a mutation in the α₂δ-4 gene causes the α₂δ-4 gene to be under-expressed or over-expressed and situations in which such mutations result in a non-functional α₂δ-4 polypeptide or a polypeptide which does not function in a wild-type fashion, e.g, a polypeptide which does not interact with an α₂δ-4 substrate, e.g., a voltage-gated calcium channel subunit or ligand, or one which interacts with a non-α₂δ-4 substrate, e.g. a non-voltage-gated calcium channel subunit or ligand. As used herein, the term “unwanted” includes an unwanted phenomenon involved in a biological response, such as cellular proliferation. For example, the term unwanted includes an α₂δ-4 expression or activity which is undesirable in a subject.

[2609] The assays described herein, such as the preceding diagnostic assays or the following assays, can be utilized to identify a subject having or at risk of developing a disorder associated with a misregulation in α₂δ-4 polypeptide activity or nucleic acid expression, such as a muscle disorder or a CNS disorder (e.g., a neurodegenerative disorder, a pain disorder, or a cellular proliferation, growth, differentiation, or migration disorder). Alternatively, the prognostic assays can be utilized to identify a subject having or at risk for developing a disorder associated with a misregulation in α₂δ-4 polypeptide activity or nucleic acid expression, such as a CNS disorder, a pain disorder, or a cellular proliferation, growth, differentiation, or migration disorder. Thus, the present invention provides a method for identifying a disease or disorder associated with aberrant or unwanted α₂δ-4 expression or activity in which a test sample is obtained from a subject and α₂δ-4 polypeptide or nucleic acid (e.g., mRNA or genomic DNA) is detected, wherein the presence of α₂δ-4 polypeptide or nucleic acid is diagnostic for a subject having or at risk of developing a disease or disorder associated with aberrant or unwanted α₂δ-4 expression or activity. As used herein, a “test sample” refers to a biological sample obtained from a subject of interest. For example, a test sample can be a biological fluid (e.g., serum), cell sample, or tissue.

[2610] Furthermore, the prognostic assays described herein can be used to determine whether a subject can be administered an agent (e.g., an agonist, antagonist, peptidomimetic, protein, peptide, nucleic acid, small molecule, or other drug candidate) to treat a disease or disorder associated with aberrant or unwanted α₂δ-4 expression or activity. For example, such methods can be used to determine whether a subject can be effectively treated with an agent for a CNS disorder, pain disorder, or a cellular proliferation, growth, differentiation, or migration disorder. Thus, the present invention provides methods for determining whether a subject can be effectively treated with an agent for a disorder associated with aberrant or unwanted α₂δ-4 expression or activity in which a test sample is obtained and α₂δ-4 polypeptide or nucleic acid expression or activity is detected (e.g., wherein the abundance of α₂δ-4 polypeptide or nucleic acid expression or activity is diagnostic for a subject that can be administered the agent to treat a disorder associated with aberrant or unwanted α₂δ-4 expression or activity).

[2611] The methods of the invention can also be used to detect genetic alterations in an α₂δ-4 gene, thereby determining if a subject with the altered gene is at risk for a disorder characterized by misregulation in α₂δ-4 polypeptide activity or nucleic acid expression, such as a CNS disorder, pain disorder, or a disorder of cellular growth, differentiation, or migration. In preferred embodiments, the methods include detecting, in a sample of cells from the subject, the presence or absence of a genetic alteration characterized by at least one of an alteration affecting the integrity of a gene encoding an α₂δ-4-polypeptide, or the mis-expression of the α₂δ-4 gene. For example, such genetic alterations can be detected by ascertaining the existence of at least one of 1) a deletion of one or more nucleotides from an α₂δ-4 gene; 2) an addition of one or more nucleotides to an α₂δ-4 gene; 3) a substitution of one or more nucleotides of an α₂δ-4 gene, 4) a chromosomal rearrangement of an α₂δ-4 gene; 5) an alteration in the level of a messenger RNA transcript of an α₂δ-4 gene, 6) aberrant modification of an α₂δ-4 gene, such as of the methylation pattern of the genomic DNA, 7) the presence of a non-wild type splicing pattern of a messenger RNA transcript of an α₂δ-4 gene, 8) a non-wild type level of an α₂δ-4-polypeptide, 9) allelic loss of an α₂δ-4 gene, and 10) inappropriate post-translational modification of an α₂δ-4-polypeptide. As described herein, there are a large number of assays known in the art which can be used for detecting alterations in an α₂δ-4 gene. A preferred biological sample is a tissue or serum sample isolated by conventional means from a subject.

[2612] In certain embodiments, detection of the alteration involves the use of a probe/primer in a polymerase chain reaction (PCR) (see, e.g., U.S. Pat. Nos. 4,683,195 and 4,683,202), such as anchor PCR or RACE PCR, or, alternatively, in a ligation chain reaction (LCR) (see, e.g., Landegran et al. (1988) Science 241:1077-1080; and Nakazawa et al. (1994) Proc. Natl. Acad. Sci. USA 91:360-364), the latter of which can be particularly useful for detecting point mutations in the α₂δ-4-gene (see Abravaya et al. (1995) Nucleic Acids Res. 23:675-682). This method can include the steps of collecting a sample of cells from a subject, isolating nucleic acid (e.g., genomic, mRNA or both) from the cells of the sample, contacting the nucleic acid sample with one or more primers which specifically hybridize to an α₂δ-4 gene under conditions such that hybridization and amplification of the α₂δ-4-gene (if present) occurs, and detecting the presence or absence of an amplification product, or detecting the size of the amplification product and comparing the length to a control sample. It is anticipated that PCR and/or LCR may be desirable to use as a preliminary amplification step in conjunction with any of the techniques used for detecting mutations described herein.

[2613] Alternative amplification methods include: self sustained sequence replication (Guatelli, J. C. et al., (1990) Proc. Natl. Acad. Sci. USA 87:1874-1878), transcriptional amplification system (Kwoh, D. Y. et al., (1989) Proc. Natl. Acad. Sci USA 86:1173-1177), Q-Beta Replicase (Lizardi, P. M. et al. (1988) Bio-Technology 6:1197), or any other nucleic acid amplification method, followed by the detection of the amplified molecules using techniques well known to those of skill in the art. These detection schemes are especially useful for the detection of nucleic acid molecules if such molecules are present in very low numbers.

[2614] In an alternative embodiment, mutations in an α₂δ-4 gene from a sample cell can be identified by alterations in restriction enzyme cleavage patterns. For example, sample and control DNA is isolated, amplified (optionally), digested with one or more restriction endonucleases, and fragment length sizes are determined by gel electrophoresis and compared. Differences in fragment length sizes between sample and control DNA indicates mutations in the sample DNA. Moreover, the use of sequence specific ribozymes (see, for example, U.S. Pat. No. 5,498,531) can be used to score for the presence of specific mutations by development or loss of a ribozyme cleavage site.

[2615] In other embodiments, genetic mutations in α₂δ-4 can be identified by hybridizing a sample and control nucleic acids, e.g., DNA or RNA, to high density arrays containing hundreds or thousands of oligonucleotides probes (Cronin, M. T. et al. (1996) Human Mutation 7: 244-255; Kozal, M. J. et al. (1996) Nature Medicine 2: 753-759). For example, genetic mutations in α₂δ-4 can be identified in two dimensional arrays containing light-generated DNA probes as described in Cronin, M. T. et al. supra. Briefly, a first hybridization array of probes can be used to scan through long stretches of DNA in a sample and control to identify base changes between the sequences by making linear arrays of sequential overlapping probes. This step allows the identification of point mutations. This step is followed by a second hybridization array that allows the characterization of specific mutations by using smaller, specialized probe arrays complementary to all variants or mutations detected. Each mutation array is composed of parallel probe sets, one complementary to the wild-type gene and the other complementary to the mutant gene.

[2616] In yet another embodiment, any of a variety of sequencing reactions known in the art can be used to directly sequence the α₂δ-4 gene and detect mutations by comparing the sequence of the sample α₂δ-4 with the corresponding wild-type (control) sequence. Examples of sequencing reactions include those based on techniques developed by Maxam and Gilbert ((1977) Proc. Natl. Acad. Sci. USA 74:560) or Sanger ((1977) Proc. Natl. Acad. Sci. USA 74:5463). It is also contemplated that any of a variety of automated sequencing procedures can be utilized when performing the diagnostic assays ((1995) Biotechniques 19:448), including sequencing by mass spectrometry (see, e.g., PCT International Publication No. WO 94/16101; Cohen et al. (1996) Adv. Chromatogr. 36:127-162; and Griffin et al. (1993) Appl. Biochem. Biotechnol. 38:147-159).

[2617] Other methods for detecting mutations in the α₂δ-4 gene include methods in which protection from cleavage agents is used to detect mismatched bases in RNA/RNA or RNA/DNA heteroduplexes (Myers et al. (1985) Science 230:1242). In general, the art technique of “mismatch cleavage” starts by providing heteroduplexes of formed by hybridizing (labeled) RNA or DNA containing the wild-type α₂δ-4 sequence with potentially mutant RNA or DNA obtained from a tissue sample. The double-stranded duplexes are treated with an agent which cleaves single-stranded regions of the duplex such as which will exist due to basepair mismatches between the control and sample strands. For instance, RNA/DNA duplexes can be treated with RNase and DNA/DNA hybrids treated with S1 nuclease to enzymatically digesting the mismatched regions. In other embodiments, either DNA/DNA or RNA/DNA duplexes can be treated with hydroxylamine or osmium tetroxide and with piperidine in order to digest mismatched regions. After digestion of the mismatched regions, the resulting material is then separated by size on denaturing polyacrylamide gels to determine the site of mutation. See, for example, Cotton et al. (1988) Proc. Natl Acad Sci USA 85:4397; Saleeba et al. (1992) Methods Enzymol. 217:286-295. In a preferred embodiment, the control DNA or RNA can be labeled for detection.

[2618] In still another embodiment, the mismatch cleavage reaction employs one or more proteins that recognize mismatched base pairs in double-stranded DNA (so called “DNA mismatch repair” enzymes) in defined systems for detecting and mapping point mutations in α₂δ-4 cDNAs obtained from samples of cells. For example, the mutY enzyme of E. coli cleaves A at G/A mismatches and the thymidine DNA glycosylase from HeLa cells cleaves T at G/T mismatches (Hsu et al. (1994) Carcinogenesis 15:1657-1662). According to an exemplary embodiment, a probe based on an α₂δ-4 sequence, e.g., a wild-type α₂δ-4 sequence, is hybridized to a cDNA or other DNA product from a test cell(s). The duplex is treated with a DNA mismatch repair enzyme, and the cleavage products, if any, can be detected from electrophoresis protocols or the like. See, for example, U.S. Pat. No. 5,459,039.

[2619] In other embodiments, alterations in electrophoretic mobility will be used to identify mutations in α₂δ-4 genes. For example, single strand conformation polymorphism (SSCP) may be used to detect differences in electrophoretic mobility between mutant and wild type nucleic acids (Orita et al. (1989) Proc Natl. Acad. Sci USA: 86:2766, see also Cotton (1993) Mutat. Res. 285:125-144; and Hayashi (1992) Genet. Anal Tech. Appl. 9:73-79). Single-stranded DNA fragments of sample and control α₂δ-4 nucleic acids will be denatured and allowed to renature. The secondary structure of single-stranded nucleic acids varies according to sequence, the resulting alteration in electrophoretic mobility enables the detection of even a single base change. The DNA fragments may be labeled or detected with labeled probes. The sensitivity of the assay may be enhanced by using RNA (rather than DNA), in which the secondary structure is more sensitive to a change in sequence. In a preferred embodiment, the subject method utilizes heteroduplex analysis to separate double stranded heteroduplex molecules on the basis of changes in electrophoretic mobility (Keen et al. (1991) Trends Genet 7:5).

[2620] In yet another embodiment the movement of mutant or wild-type fragments in polyacrylamide gels containing a gradient of denaturant is assayed using denaturing gradient gel electrophoresis (DGGE) (Myers et al. (1985) Nature 313:495). When DGGE is used as the method of analysis, DNA will be modified to insure that it does not completely denature, for example by adding a GC clamp of approximately 40 bp of high-melting GC-rich DNA by PCR. In a further embodiment, a temperature gradient is used in place of a denaturing gradient to identify differences in the mobility of control and sample DNA (Rosenbaum and Reissner (1987) Biophys Chem 265:12753).

[2621] Examples of other techniques for detecting point mutations include, but are not limited to, selective oligonucleotide hybridization, selective amplification, or selective primer extension. For example, oligonucleotide primers may be prepared in which the known mutation is placed centrally and then hybridized to target DNA under conditions which permit hybridization only if a perfect match is found (Saiki et al. (1986) Nature 324:163); Saiki et al. (1989) Proc. Natl Acad. Sci USA 86:6230). Such allele specific oligonucleotides are hybridized to PCR amplified target DNA or a number of different mutations when the oligonucleotides are attached to the hybridizing membrane and hybridized with labeled target DNA.

[2622] Alternatively, allele specific amplification technology which depends on selective PCR amplification may be used in conjunction with the instant invention. Oligonucleotides used as primers for specific amplification may carry the mutation of interest in the center of the molecule (so that amplification depends on differential hybridization) (Gibbs et al. (1989) Nucleic Acids Res. 17:2437-2448) or at the extreme 3′ end of one primer where, under appropriate conditions, mismatch can prevent, or reduce polymerase extension (Prossner (1993) Tibtech 11:238). In addition it may be desirable to introduce a novel restriction site in the region of the mutation to create cleavage-based detection (Gasparini et al. (1992) Mol. Cell Probes 6:1). It is anticipated that in certain embodiments amplification may also be performed using Taq ligase for amplification (Barany (1991) Proc. Natl. Acad. Sci USA 88:189). In such cases, ligation will occur only if there is a perfect match at the 3′ end of the 5′ sequence making it possible to detect the presence of a known mutation at a specific site by looking for the presence or absence of amplification.

[2623] The methods described herein may be performed, for example, by utilizing pre-packaged diagnostic kits comprising at least one probe nucleic acid or antibody reagent described herein, which may be conveniently used, e.g., in clinical settings to diagnose patients exhibiting symptoms or family history of a disease or illness involving an α₂δ-4 gene.

[2624] Furthermore, any cell type or tissue in which α₂δ-4 is expressed may be utilized in the prognostic assays described herein.

[2625] 3. Monitoring of Effects During Clinical Trials

[2626] Monitoring the influence of agents (e.g., drugs) on the expression or activity of an α₂δ-4 polypeptide (e.g., the modulation of membrane excitability) can be applied not only in basic drug screening, but also in clinical trials. For example, the effectiveness of an agent determined by a screening assay as described herein to increase α₂δ-4 gene expression, polypeptide levels, or upregulate α₂δ-4 activity, can be monitored in clinical trials of subjects exhibiting decreased α₂δ-4 gene expression, polypeptide levels, or downregulated α₂δ-4 activity. Alternatively, the effectiveness of an agent determined by a screening assay to decrease α₂δ-4 gene expression, polypeptide levels, or downregulate α₂δ-4 activity, can be monitored in clinical trials of subjects exhibiting increased α₂δ-4 gene expression, polypeptide levels, or upregulated α₂δ-4 activity. In such clinical trials, the expression or activity of an α₂δ-4 gene, and preferably, other genes that have been implicated in, for example, an α₂δ-4-associated disorder can be used as a “read out” or markers of the phenotype of a particular cell.

[2627] For example, and not by way of limitation, genes, including α₂δ-4, that are modulated in cells by treatment with an agent (e.g., compound, drug or small molecule) which modulates α₂δ-4 activity (e.g., identified in a screening assay as described herein) can be identified. Thus, to study the effect of agents on α₂δ-4-associated disorders (e.g, disorders characterized by deregulated signaling or membrane excitation), for example, in a clinical trial, cells can be isolated and RNA prepared and analyzed for the levels of expression of α₂δ-4 and other genes implicated in the α₂δ-4-associated disorder, respectively. The levels of gene expression (e.g., a gene expression pattern) can be quantified by northern blot analysis or RT-PCR, as described herein, or alternatively by measuring the amount of polypeptide produced, by one of the methods as described herein, or by measuring the levels of activity of α₂δ-4 or other genes. In this way, the gene expression pattern can serve as a marker, indicative of the physiological response of the cells to the agent. Accordingly, this response state may be determined before, and at various points during treatment of the individual with the agent.

[2628] In a preferred embodiment, the present invention provides a method for monitoring the effectiveness of treatment of a subject with an agent (e.g., an agonist, antagonist, peptidomimetic, protein, peptide, nucleic acid, small molecule, or other drug candidate identified by the screening assays described herein) including the steps of (i) obtaining a pre-administration sample from a subject prior to administration of the agent; (ii) detecting the level of expression of an α₂δ-4 polypeptide, mRNA, or genomic DNA in the preadministration sample; (iii) obtaining one or more post-administration samples from the subject; (iv) detecting the level of expression or activity of the α₂δ-4 polypeptide, mRNA, or genomic DNA in the post-administration samples; (v) comparing the level of expression or activity of the α₂δ-4 polypeptide, mRNA, or genomic DNA in the pre-administration sample with the α₂δ-4 polypeptide, mRNA, or genomic DNA in the post administration sample or samples; and (vi) altering the administration of the agent to the subject accordingly. For example, increased administration of the agent may be desirable to increase the expression or activity of α₂δ-4 to higher levels than detected, i.e., to increase the effectiveness of the agent. Alternatively, decreased administration of the agent may be desirable to decrease expression or activity of α₂δ-4 to lower levels than detected, i.e. to decrease the effectiveness of the agent. According to such an embodiment, α₂δ-4 expression or activity may be used as an indicator of the effectiveness of an agent, even in the absence of an observable phenotypic response.

[2629] D. Methods of Treatment:

[2630] The present invention provides for both prophylactic and therapeutic methods of treating a subject at risk of (or susceptible to) a disorder or having a disorder associated with aberrant or unwanted α₂δ-4 expression or activity, e.g. a muscle disorder, a CNS disorder, a pain disorder, or a cellular proliferation, growth, differentiation, or migration disorder. The term “treatment” as used herein, is defined as the application or administration of a therapeutic agent to a patient, or application or administration of a therapeutic agent to an isolated tissue or cell line from a patient, who has a disease, a symptom of disease or a predisposition toward a disease, with the purpose to cure, heal, alleviate, relieve, alter, remedy, ameliorate, improve or affect the disease, the symptoms of disease or the predisposition toward disease. A therapeutic agent includes, but is not limited to, small molecules, peptides, antibodies, ribozymes and antisense oligonucleotides. With regards to both prophylactic and therapeutic methods of treatment, such treatments may be specifically tailored or modified, based on knowledge obtained from the field of pharmacogenomics. “Pharmacogenomics”, as used herein, refers to the application of genomics technologies such as gene sequencing, statistical genetics, and gene expression analysis to drugs in clinical development and on the market. More specifically, the term refers the study of how a patient's genes determine his or her response to a drug (e.g., a patient's “drug response phenotype”, or “drug response genotype”). Thus, another aspect of the invention provides methods for tailoring an individual's prophylactic or therapeutic treatment with either the α₂δ-4 molecules of the present invention or α₂δ-4 modulators according to that individual's drug response genotype. Pharmacogenomics allows a clinician or physician to target prophylactic or therapeutic treatments to patients who will most benefit from the treatment and to avoid treatment of patients who will experience toxic drug-related side effects.

[2631] 1. Prophylactic Methods

[2632] In one aspect, the invention provides a method for preventing in a subject, a disease or condition associated with an aberrant or unwanted α₂δ-4 expression or activity, by administering to the subject an α₂δ-4 or an agent which modulates α₂δ-4 expression or at least one α₂δ-4 activity. Subjects at risk for a disease which is caused or contributed to by aberrant or unwanted α₂δ-4 expression or activity can be identified by, for example, any or a combination of diagnostic or prognostic assays as described herein. Administration of a prophylactic agent can occur prior to the manifestation of symptoms characteristic of the α₂δ-4 aberrancy, such that a disease or disorder is prevented or, alternatively, delayed in its progression. Depending on the type of α₂δ-4 aberrancy, for example, an α₂δ-4, α₂δ-4 agonist or α₂δ-4 antagonist agent can be used for treating the subject. The appropriate agent can be determined based on screening assays described herein.

[2633] 2. Therapeutic Methods

[2634] Another aspect of the invention pertains to methods of modulating α₂δ-4 expression or activity for therapeutic purposes. Accordingly, in an exemplary embodiment, the modulatory method of the invention involves contacting a cell capable of expressing α₂δ-4 with an agent that modulates one or more of the activities of α₂δ-4 polypeptide activity associated with the cell, such that α₂δ-4 activity in the cell is modulated. An agent that modulates α₂δ-4 polypeptide activity can be an agent as described herein, such as a nucleic acid or a polypeptide, a naturally-occurring target molecule of an α₂δ-4 polypeptide (e.g., an α₂δ-4 substrate), an α₂δ-4 antibody, an α₂δ-4 agonist or antagonist, a peptidomimetic of an α₂δ-4 agonist or antagonist, or other small molecule. In one embodiment, the agent stimulates one or more α₂δ-4 activities. Examples of such stimulatory agents include active α₂δ-4 polypeptide and a nucleic acid molecule encoding α₂δ-4 that has been introduced into the cell. In another embodiment, the agent inhibits one or more α₂δ-4 activities. Examples of such inhibitory agents include antisense α₂δ-4 nucleic acid molecules, anti-α₂δ-4 antibodies, and α₂δ-4 inhibitors. These modulatory methods can be performed in vitro (e.g., by culturing the cell with the agent) or, alternatively, in vivo (e.g., by administering the agent to a subject). As such, the present invention provides methods of treating an individual afflicted with a disease or disorder characterized by aberrant or unwanted expression or activity of an α₂δ-4 polypeptide or nucleic acid molecule. In one embodiment, the method involves administering an agent (e.g., an agent identified by a screening assay described herein), or combination of agents that modulates (e.g., upregulates or downregulates) α₂δ-4 expression or activity. In another embodiment, the method involves administering an α₂δ-4 polypeptide or nucleic acid molecule as therapy to compensate for reduced, aberrant, or unwanted α₂δ-4 expression or activity.

[2635] Stimulation of α₂δ-4 activity is desirable in situations in which α₂δ-4 is abnormally downregulated and/or in which increased α₂δ-4 activity is likely to have a beneficial effect. Likewise, inhibition of α₂δ-4 activity is desirable in situations in which α₂δ-4 is abnormally upregulated and/or in which decreased α₂δ-4 activity is likely to have a beneficial effect.

[2636] 3. Pharmacogenomics

[2637] The α₂δ-4 molecules of the present invention, as well as agents, or modulators which have a stimulatory or inhibitory effect on α₂δ-4 activity (e.g., α₂δ-4 gene expression) as identified by a screening assay described herein can be administered to individuals to treat (prophylactically or therapeutically) α₂δ-4-associated disorders (e.g., proliferative disorders) associated with aberrant or unwanted α₂δ-4 activity. In conjunction with such treatment, pharmacogenomics (i.e., the study of the relationship between an individual's genotype and that individual's response to a foreign compound or drug) may be considered. Differences in metabolism of therapeutics can lead to severe toxicity or therapeutic failure by altering the relation between dose and blood concentration of the pharmacologically active drug. Thus, a physician or clinician may consider applying knowledge obtained in relevant pharmacogenomics studies in determining whether to administer an α₂δ-4 molecule or α₂δ-4 modulator as well as tailoring the dosage and/or therapeutic regimen of treatment with an α₂δ-4 molecule or α₂δ-4 modulator.

[2638] Pharmacogenomics deals with clinically significant hereditary variations in the response to drugs due to altered drug disposition and abnormal action in affected persons. See, for example, Eichelbaum, M. et al. (1996) Clin. Exp. Pharmacol. Physiol. 23(10-11): 983-985 and Linder, M. W. et al. (1997) Clin. Chem. 43(2):254-266. In general, two types of pharmacogenetic conditions can be differentiated. Genetic conditions transmitted as a single factor altering the way drugs act on the body (altered drug action) or genetic conditions transmitted as single factors altering the way the body acts on drugs (altered drug metabolism). These pharmacogenetic conditions can occur either as rare genetic defects or as naturally-occurring polymorphisms. For example, glucose-6-phosphate dehydrogenase deficiency (G6PD) is a common inherited enzymopathy in which the main clinical complication is haemolysis after ingestion of oxidant drugs (anti-malarials, sulfonamides, analgesics, nitrofurans) and consumption of fava beans.

[2639] One pharmacogenomics approach to identifying genes that predict drug response, known as “a genome-wide association”, relies primarily on a high-resolution map of the human genome consisting of already known gene-related markers (e.g., a “bi-allelic” gene marker map which consists of 60,000-100,000 polymorphic or variable sites on the human genome, each of which has two variants.) Such a high-resolution genetic map can be compared to a map of the genome of each of a statistically significant number of patients taking part in a Phase II/III drug trial to identify markers associated with a particular observed drug response or side effect. Alternatively, such a high resolution map can be generated from a combination of some ten-million known single nucleotide polymorphisms (SNPs) in the human genome. As used herein, a “SNP” is a common alteration that occurs in a single nucleotide base in a stretch of DNA. For example, a SNP may occur once per every 1000 bases of DNA. A SNP may be involved in a disease process, however, the vast majority may not be disease-associated. Given a genetic map based on the occurrence of such SNPs, individuals can be grouped into genetic categories depending on a particular pattern of SNPs in their individual genome. In such a manner, treatment regimens can be tailored to groups of genetically similar individuals, taking into account traits that may be common among such genetically similar individuals.

[2640] Alternatively, a method termed the “candidate gene approach”, can be utilized to identify genes that predict drug response. According to this method, if a gene that encodes a drugs target is known (e.g., an α₂δ-4 polypeptide of the present invention), all common variants of that gene can be fairly easily identified in the population and it can be determined if having one version of the gene versus another is associated with a particular drug response.

[2641] As an illustrative embodiment, the activity of drug metabolizing enzymes is a major determinant of both the intensity and duration of drug action. The discovery of genetic polymorphisms of drug metabolizing enzymes (e.g., N-acetyltransferase 2 (NAT 2) and cytochrome P450 enzymes CYP2D6 and CYP2C19) has provided an explanation as to why some patients do not obtain the expected drug effects or show exaggerated drug response and serious toxicity after taking the standard and safe dose of a drug. These polymorphisms are expressed in two phenotypes in the population, the extensive metabolizer (EM) and poor metabolizer (PM). The prevalence of PM is different among different populations. For example, the gene coding for CYP2D6 is highly polymorphic and several mutations have been identified in PM, which all lead to the absence of functional CYP2D6. Poor metabolizers of CYP2D6 and CYP2C19 quite frequently experience exaggerated drug response and side effects when they receive standard doses. If a metabolite is the active therapeutic moiety, PM show no therapeutic response, as demonstrated for the analgesic effect of codeine mediated by its CYP2D6-formed metabolite morphine. The other extreme are the so called ultra-rapid metabolizers who do not respond to standard doses. Recently, the molecular basis of ultra-rapid metabolism has been identified to be due to CYP2D6 gene amplification.

[2642] Alternatively, a method termed the “gene expression profiling”, can be utilized to identify genes that predict drug response. For example, the gene expression of an animal dosed with a drug (e.g., an α₂δ-4 molecule or α₂δ-4 modulator of the present invention) can give an indication whether gene pathways related to toxicity have been turned on.

[2643] Information generated from more than one of the above pharmacogenomics approaches can be used to determine appropriate dosage and treatment regimens for prophylactic or therapeutic treatment an individual. This knowledge, when applied to dosing or drug selection, can avoid adverse reactions or therapeutic failure and thus enhance therapeutic or prophylactic efficiency when treating a subject with an α₂δ-4 molecule or α₂δ-4 modulator, such as a modulator identified by one of the exemplary screening assays described herein.

[2644] 4. Use of α₂δ-4 Molecules as Surrogate Markers

[2645] The α₂δ-4 molecules of the invention are also useful as markers of disorders or disease states, as markers for precursors of disease states, as markers for predisposition of disease states, as markers of drug activity, or as markers of the pharmacogenomic profile of a subject. Using the methods described herein, the presence, absence and/or quantity of the α₂δ-4 molecules of the invention may be detected, and may be correlated with one or more biological states in vivo. For example, the α₂δ-4 molecules of the invention may serve as surrogate markers for one or more disorders or disease states or for conditions leading up to disease states. As used herein, a “surrogate marker” is an objective biochemical marker which correlates with the absence or presence of a disease or disorder, or with the progression of a disease or disorder (e.g., with the presence or absence of a tumor). The presence or quantity of such markers is independent of the disease. Therefore, these markers may serve to indicate whether a particular course of treatment is effective in lessening a disease state or disorder. Surrogate markers are of particular use when the presence or extent of a disease state or disorder is difficult to assess through standard methodologies (e.g., early stage tumors), or when an assessment of disease progression is desired before a potentially dangerous clinical endpoint is reached (e.g., an assessment of cardiovascular disease may be made using cholesterol levels as a surrogate marker, and an analysis of HIV infection may be made using HIV RNA levels as a surrogate marker, well in advance of the undesirable clinical outcomes of myocardial infarction or fully-developed AIDS). Examples of the use of surrogate markers in the art include: Koomen et al. (2000) J. Mass. Spectrom. 35: 258-264; and James (1994) AIDS Treatment News Archive 209.

[2646] The α₂δ-4 molecules of the invention are also useful as pharmacodynamic markers. As used herein, a “pharmacodynamic marker” is an objective biochemical marker which correlates specifically with drug effects. The presence or quantity of a pharmacodynamic marker is not related to the disease state or disorder for which the drug is being administered; therefore, the presence or quantity of the marker is indicative of the presence or activity of the drug in a subject. For example, a pharmacodynamic marker may be indicative of the concentration of the drug in a biological tissue, in that the marker is either expressed or transcribed or not expressed or transcribed in that tissue in relationship to the level of the drug. In this fashion, the distribution or uptake of the drug may be monitored by the pharmacodynamic marker. Similarly, the presence or quantity of the pharmacodynamic marker may be related to the presence or quantity of the metabolic product of a drug, such that the presence or quantity of the marker is indicative of the relative breakdown rate of the drug in vivo. Pharmacodynamic markers are of particular use in increasing the sensitivity of detection of drug effects, particularly when the drug is administered in low doses. Since even a small amount of a drug may be sufficient to activate multiple rounds of marker (e.g., an α₂δ-4 marker) transcription or expression, the amplified marker may be in a quantity which is more readily detectable than the drug itself. Also, the marker may be more easily detected due to the nature of the marker itself, for example, using the methods described herein, anti-α₂δ-4 antibodies may be employed in an immune-based detection system for an α₂δ-4 polypeptide marker, or α₂δ-4-specific radiolabeled probes may be used to detect an α₂δ-4 mRNA marker. Furthermore, the use of a pharmacodynamic marker may offer mechanism-based prediction of risk due to drug treatment beyond the range of possible direct observations. Examples of the use of pharmacodynamic markers in the art include: Matsuda et al. U.S. Pat. No. 6,033,862; Hattis et al. (1991) Env. Health Perspect. 90: 229-238; Schentag (1999) Am. J. Health-Syst. Pharm. 56 Suppl. 3: S21-S24; and Nicolau (1999) Am, J. Health-Syst. Pharm. 56 Suppl. 3: S16-S20. The α₂δ-4 molecules of the invention are also useful as pharmacogenomic markers. As used herein, a “pharmacogenomic marker” is an objective biochemical marker which correlates with a specific clinical drug response or susceptibility in a subject (see, e.g., McLeod et al. (1999) Eur. J. Cancer 35(12): 1650-1652). The presence or quantity of the pharmacogenomic marker is related to the predicted response of the subject to a specific drug or class of drugs prior to administration of the drug. By assessing the presence or quantity of one or more pharmacogenomic markers in a subject, a drug therapy which is most appropriate for the subject, or which is predicted to have a greater degree of success, may be selected. For example, based on the presence or quantity of RNA, or polypeptide (e.g., α₂δ-4 polypeptide or RNA) for specific tumor markers in a subject, a drug or course of treatment may be selected that is optimized for the treatment of the specific tumor likely to be present in the subject. Similarly, the presence or absence of a specific sequence mutation in α₂δ-4 DNA may correlate α₂δ-4 drug response. The use of pharmacogenomic markers therefore permits the application of the most appropriate treatment for each subject without having to administer the therapy.

[2647] E. Electronic Apparatus Readable Media and Arrays

[2648] Electronic apparatus readable media comprising α₂δ-4 sequence information is also provided. As used herein, “α₂δ-4 sequence information” refers to any nucleotide and/or amino acid sequence information particular to the α₂δ-4 molecules of the present invention, including but not limited to full-length nucleotide and/or amino acid sequences, partial nucleotide and/or amino acid sequences, polymorphic sequences including single nucleotide polymorphisms (SNPs), epitope sequences, and the like. Moreover, information “related to” said α₂δ-4 sequence information includes detection of the presence or absence of a sequence (e.g., detection of expression of a sequence, fragment, polymorphism, etc.), determination of the level of a sequence (e.g., detection of a level of expression, for example, a quantitative detection), detection of a reactivity to a sequence (e.g., detection of protein expression and/or levels, for example, using a sequence-specific antibody), and the like. As used herein, “electronic apparatus readable media” refers to any suitable medium for storing, holding or containing data or information that can be read and accessed directly by an electronic apparatus. Such media can include, but are not limited to: magnetic storage media, such as floppy discs, hard disc storage medium, and magnetic tape; optical storage media such as compact disc; electronic storage media such as RAM, ROM, EPROM, EEPROM and the like; general hard disks and hybrids of these categories such as magnetic/optical storage media. The medium is adapted or configured for having recorded thereon α₂δ-4 sequence information of the present invention.

[2649] As used herein, the term “electronic apparatus” is intended to include any suitable computing or processing apparatus or other device configured or adapted for storing data or information. Examples of electronic apparatus suitable for use with the present invention include stand-alone computing apparatus; networks, including a local area network (LAN), a wide area network (WAN) Internet, Intranet, and Extranet; electronic appliances such as a personal digital assistants (PDAs), cellular phone, pager and the like; and local and distributed processing systems.

[2650] As used herein, “recorded” refers to a process for storing or encoding information on the electronic apparatus readable medium. Those skilled in the art can readily adopt any of the presently known methods for recording information on known media to generate manufactures comprising the α₂δ-4 sequence information.

[2651] A variety of software programs and formats can be used to store the sequence information on the electronic apparatus readable medium. For example, the sequence information can be represented in a word processing text file, formatted in commercially-available software such as WordPerfect and Microsoft Word, or represented in the form of an ASCII file, stored in a database application, such as DB2, Sybase, Oracle, or the like, as well as in other forms. Any number of data processor structuring formats (e.g., text file or database) may be employed in order to obtain or create a medium having recorded thereon the α₂δ-4 sequence information.

[2652] By providing α₂δ-4 sequence information in readable form, one can routinely access the sequence information for a variety of purposes. For example, one skilled in the art can use the sequence information in readable form to compare a target sequence or target structural motif with the sequence information stored within the data storage means. Search means are used to identify fragments or regions of the sequences of the invention which match a particular target sequence or target motif.

[2653] The present invention therefore provides a medium for holding instructions for performing a method for determining whether a subject has a α₂δ-4-associated disease or disorder or a pre-disposition to a α₂δ-4-associated disease or disorder, wherein the method comprises the steps of determining α₂δ-4 sequence information associated with the subject and based on the α₂δ-4 sequence information, determining whether the subject has a α₂δ-4-associated disease or disorder or a pre-disposition to a α₂δ-4-associated disease or disorder and/or recommending a particular treatment for the disease, disorder or pre-disease condition.

[2654] The present invention further provides in an electronic system and/or in a network, a method for determining whether a subject has a α₂δ-4-associated disease or disorder or a pre-disposition to a disease associated with a α₂δ-4 wherein the method comprises the steps of determining α₂δ-4 sequence information associated with the subject, and based on the -4 sequence information, determining whether the subject has a α₂δ-4-associated disease or disorder or a pre-disposition to a α₂δ-4-associated disease or disorder, and/or recommending a particular treatment for the disease, disorder or pre-disease condition. The method may further comprise the step of receiving phenotypic information associated with the subject and/or acquiring from a network phenotypic information associated with the subject.

[2655] The present invention also provides in a network, a method for determining whether a subject has a α₂δ-4-associated disease or disorder or a pre-disposition to a α₂δ-4 associated disease or disorder associated with α₂δ-4, said method comprising the steps of receiving α₂δ-4 sequence information from the subject and/or information related thereto, receiving phenotypic information associated with the subject, acquiring information from the network corresponding to α₂δ-4 and/or a α₂δ-4-associated disease or disorder, and based on one or more of the phenotypic information, the α₂δ-4 information (e.g., sequence information and/or information related thereto), and the acquired information, determining whether the subject has a α₂δ-4-associated disease or disorder or a pre-disposition to a α₂δ-4-associated disease or disorder (e.g., a cellular growth or proliferation disease or disorder, for example, cancer). The method may further comprise the step of recommending a particular treatment for the disease, disorder or pre-disease condition.

[2656] The present invention also provides a business method for determining whether a subject has a α₂δ-4-associated disease or disorder or a pre-disposition to a α₂δ-4-associated disease or disorder, said method comprising the steps of receiving information related to α₂δ-4 (e.g., sequence information and/or information related thereto), receiving phenotypic information associated with the subject, acquiring information from the network related to α₂δ-4 and/or related to a α₂δ-4-associated disease or disorder, and based on one or more of the phenotypic information, the α₂δ-4 information, and the acquired information, determining whether the subject has a α₂δ-4-associated disease or disorder or a pre-disposition to a α₂δ-4-associated disease or disorder. The method may further comprise the step of recommending a particular treatment for the disease, disorder or pre-disease condition.

[2657] The invention also includes an array comprising a α₂δ-4 sequence of the present invention. The array can be used to assay expression of one or more genes in the array. In one embodiment, the array can be used to assay gene expression in a tissue to ascertain tissue specificity of genes in the array. In this manner, up to about 7600 genes can be simultaneously assayed for expression, one of which can be α₂δ-4. This allows a profile to be developed showing a battery of genes specifically expressed in one or more tissues.

[2658] In addition to such qualitative determination, the invention allows the quantitation of gene expression. Thus, not only tissue specificity, but also the level of expression of a battery of genes in the tissue is ascertainable. Thus, genes can be grouped on the basis of their tissue expression per se and level of expression in that tissue. This is useful, for example, in ascertaining the relationship of gene expression between or among tissues. Thus, one tissue can be perturbed and the effect on gene expression in a second tissue can be determined. In this context, the effect of one cell type on another cell type in response to a biological stimulus can be determined. Such a determination is useful, for example, to know the effect of cell-cell interaction at the level of gene expression. If an agent is administered therapeutically to treat one cell type but has an undesirable effect on another cell type, the invention provides an assay to determine the molecular basis of the undesirable effect and thus provides the opportunity to co-administer a counteracting agent or otherwise treat the undesired effect. Similarly, even within a single cell type, undesirable biological effects can be determined at the molecular level. Thus, the effects of an agent on expression of other than the target gene can be ascertained and counteracted.

[2659] In another embodiment, the array can be used to monitor the time course of expression of one or more genes in the array. This can occur in various biological contexts, as disclosed herein, for example development of a α₂δ-4-associated disease or disorder, progression of α₂δ-4-associated disease or disorder, and processes, such a cellular transformation associated with the α₂δ-4-associated disease or disorder.

[2660] The array is also useful for ascertaining the effect of the expression of a gene on the expression of other genes in the same cell or in different cells (e.g., ascertaining the effect of α₂δ-4 expression on the expression of other genes). This provides, for example, for a selection of alternate molecular targets for therapeutic intervention if the ultimate or downstream target cannot be regulated.

[2661] The array is also useful for ascertaining differential expression patterns of one or more genes in normal and abnormal cells. This provides a battery of genes (e.g., including α₂δ-4) that could serve as a molecular target for diagnosis or therapeutic intervention.

[2662] This invention is further illustrated by the following examples which should not be construed as limiting. The contents of all references, patents and published patent applications cited throughout this application, as well as the Figures and the Sequence Listing, are incorporated herein by reference.

### EXAMPLES

### Example 1

### Identification and Characterization of Human α₂δ-4 cDNA

[2663] In this example, the identification and characterization of the gene encoding human α₂δ-4 (clone 25658) is described.

[2664] Isolation of the Human α₂δ-4 cDNA

[2665] The invention is based, at least in part, on the discovery of a human gene encoding a novel polypeptide, referred to herein as human α₂δ-4. The entire sequence of the human clone 25658 was determined and found to contain an open reading frame termed human “α₂δ-4.” The nucleotide sequence of the human α₂δ-4 gene is set forth in FIGS. 41A-D and in the Sequence Listing as SEQ ID NO:1. The amino acid sequence of the human α₂δ-4 expression product is set forth in FIGS. 41A-D and in the Sequence Listing as SEQ ID NO: 2. The α₂δ-4 polypeptide comprises about 1223 amino acids. The coding region (open reading frame) of SEQ ID NO:1 is set forth as SEQ ID NO:3. Clone 25658, comprising the coding region of human α₂δ-4, was deposited with the American Type Culture Collection (ATCC®), 10801 University Boulevard, Manassas, Va. 20110-2209, on ______, and assigned Accession No. ______.

[2666] Analysis of the Human α₂δ-4 Molecules

[2667] The human α₂δ-4 amino acid sequence (SEQ ID NO:44) was aligned with the amino acid sequence of the human dihydropyridine-sensitive L-type calcium channel α₂δ subunit protein CIC2 (SwissProt Accession No. P54289), using the CLUSTAL W (1.74) alignment program. The results of the alignment are set forth in FIGS. 43A-43B.

[2668] A search using the polypeptide sequence of SEQ ID NO:44 was also performed against a proprietary HMM database resulting in the identification of a potential von Willebrand factor type A domain in the amino acid sequence of α₂δ-4 at about residues 175-371 of SEQ ID NO:44 (score=6.1).

[2669] A MEMSAT analysis of the polypeptide sequence of SEQ ID NO:44 was also performed, predicting two potential transmembrane domains in the amino acid sequence of α₂δ-4 (SEQ ID NO:44) at about residues 422-442, and 1048-1066.

[2670] Searches of the amino acid sequence of α₂δ-4 were further performed against the Prosite database. These searches resulted in the identification in the amino acid sequence of α₂δ-4 of a number of potential N-glycosylation sites(e.g., 94-97, 278-281, 322-325, 517-520, 536-539, 854-857, 889-892, 934-937), a number of potential cAMP- and cGMP-dependent protein kinase phosphorylation sites (e.g., 244-247, 307-310), a number of potential protein kinase C phosphorylation sites (e.g., 24-26, 170-172, 221-223, 242-244, 252-254, 298-300, 354-356, 530-532, 573-575, 623-625, 649-651, 704-706, 762-764, 817-819, 843-845, 974-976, 1087-1089, 1191-1193), a number of potential casein kinase II phosphorylation sites (e.g., 379-382, 530-533, 613-616, 619-622, 666-669, 695-698, 801-804, 817-820, 841-844, 901-904, 936-939, 955-958, 999-1002, 1091-1094, 1138-1141, 1150-1153), a number of potential tyrosine kinase phosphorylation sites (e.g., 56-63, 998-1005), a number of potential N-myristoylation sites (e.g., 89-94, 185-190, 413-418, 585-590, 645-650, 758-763, 867-872, 933-938, 960-965, 984-989, 1014-1019, 1050-1055, 1109-1114, 1168-1173), a potential prokaryotic membrane lipoprotein lipid attachment site(e.g., 1045-1055), and a potential cytochrome c family heme-binding site signature (e.g., 907-912).

[2671] To further identify potential structural and/or functional properties in a protein of interest, the amino acid sequence of the protein is searched against a database of annotated protein domains (e.g., the ProDom database) using the default parameters (available at http://www.toulouse.inra.fr/prodom.html). A search of the amino acid sequence of human SEQ ID NO:44 was performed against the ProDom database. This search resulted in the local alignment of the human SEQ ID NO:44 protein with various calcium channel proteins.

[2672] Tissue Distribution of Human α₂δ-4 mRNA

[2673] This example describes the tissue distribution of human α₂δ-4 mRNA, as may be determined by Polymerase Chain Reaction (PCR) on cDNA libraries using oligonucleotide primers based on the human α₂δ-4 sequence.

[2674] For in situ analysis, various tissues, e.g. tissues obtained from muscles or brain, are first frozen on dry ice. Ten-micrometer-thick sections of the tissues are postfixed with 4% formaldehyde in DEPC treated 1×phosphate-buffered saline at room temperature for 10 minutes before being rinsed twice in DEPC 1×phosphate-buffered saline and once in 0.1 M triethanolamine-HCl (pH 8.0). Following incubation in 0.25% acetic anhydride-0.1 M triethanolamine-HCl for 10 minutes, sections are rinsed in DEPC 2×SSC (1×SSC is 0.15M NaCl plus 0.015M sodium citrate). Tissue is then dehydrated through a series of ethanol washes, incubated in 100% chloroform for 5 minutes, and then rinsed in 100% ethanol for 1 minute and 95% ethanol for 1 minute and allowed to air dry.

[2675] Hybridizations are performed with ³⁵S-radiolabeled (5×10⁷ cpm/ml) cRNA probes. Probes are incubated in the presence of a solution containing 600 mM NaCl, 10 mM Tris (pH 7.5), 1 mM EDTA, 0.01% sheared salmon sperm DNA, 0.01% yeast tRNA, 0.05% yeast total RNA type X1, 1×Denhardt's solution, 50% formamide, 10% dextran sulfate, 100 mM dithiothreitol, 0.1% sodium dodecyl sulfate (SDS), and 0.1% sodium thiosulfate for 18 hours at 55° C.

[2676] After hybridization, slides are washed with 2×SSC. Sections are then sequentially incubated at 37° C. in TNE (a solution containing 10 mM Tris-HCl (pH 7.6), 500 mM NaCl, and 1 mM EDTA), for 10 minutes, in TNE with 10 μg of RNase A per ml for 30 minutes, and finally in TNE for 10 minutes. Slides are then rinsed with 2×SSC at room temperature, washed with 2×SSC at 50° C. for 1 hour, washed with 0.2×SSC at 55° C. for 1 hour, and 0.2×SSC at 60° C. for 1 hour. Sections are then dehydrated rapidly through serial ethanol-0.3 M sodium acetate concentrations before being air dried and exposed to Kodak Biomax MR scientific imaging film for 24 hours and subsequently dipped in NB-2 photoemulsion and exposed at 4° C. for 7 days before being developed and counter stained.

### Example 2

### Expression of Recombinant α₂δ-4 Polypeptide in Bacterial Cells

[2677] In this example, human α₂δ-4 is expressed as a recombinant glutathione-S-transferase (GST) fusion polypeptide in E. coli and the fusion polypeptide is isolated and characterized. Specifically, α₂δ-4 is fused to GST and this fusion polypeptide is expressed in E. coli, e.g., strain PEB199. Expression of the GST-α₂δ-4 fusion polypeptide in PEB199 is induced with IPTG. The recombinant fusion polypeptide is purified from crude bacterial lysates of the induced PEB199 strain by affinity chromatography on glutathione beads. Using polyacrylamide gel electrophoretic analysis of the polypeptide purified from the bacterial lysates, the molecular weight of the resultant fusion polypeptide is determined.

### Example 3

### Expression of Recombinant α₂δ-4 Polypeptide in COS Cells

[2678] To express the human α₂δ-4 gene in COS cells, the pcDNA/Amp vector by Invitrogen Corporation (San Diego, Calif.) is used. This vector contains an SV40 origin of replication, an ampicillin resistance gene, an E. coli replication origin, a CMV promoter followed by a polylinker region, and an SV40 intron and polyadenylation site. A DNA fragment encoding the entire α₂δ-4 polypeptide and an HA tag (Wilson et al. (1984) Cell 37:767) or a FLAG tag fused in-frame to its 3′ end of the fragment is cloned into the polylinker region of the vector, thereby placing the expression of the recombinant polypeptide under the control of the CMV promoter.

[2679] To construct the plasmid, the human α₂δ-4 DNA sequence is amplified by PCR using two primers. The 5′ primer contains the restriction site of interest followed by approximately twenty nucleotides of the α₂δ-4 coding sequence starting from the initiation codon; the 3′ end sequence contains complementary sequences to the other restriction site of interest, a translation stop codon, the HA tag or FLAG tag and the last 20 nucleotides of the α₂δ-4 coding sequence. The PCR amplified fragment and the pCDNA/Amp vector are digested with the appropriate restriction enzymes and the vector is dephosphorylated using the CIAP enzyme (New England Biolabs, Beverly, Mass.). Preferably the two restriction sites chosen are different so that the α₂δ-4 gene is inserted in the correct orientation. The ligation mixture is transformed into E. coli cells (strains HB101, DH5α, SURE, available from Stratagene Cloning Systems, La Jolla, Calif., can be used), the transformed culture is plated on ampicillin media plates, and resistant colonies are selected. Plasmid DNA is isolated from transformants and examined by restriction analysis for the presence of the correct fragment.

[2680] COS cells are subsequently transfected with the human α₂δ-4-pcDNA/Amp plasmid DNA using the calcium phosphate or calcium chloride co-precipitation methods, DEAE-dextran-mediated transfection, lipofection, or electroporation. Other suitable methods for transfecting host cells can be found in Sambrook, J., Fritsh, E. F., and Maniatis, T. Molecular Cloning: A Laboratory Manual. 2nd, ed., Cold Spring Harbor Laboratory, Cold Spring Harbor Laboratory Press, Cold Spring Harbor, N.Y., 1989. The expression of the IC54420 polypeptide is detected by radiolabeling (³⁵S-methionine or ³⁵S-cysteine available from NEN, Boston, Mass., can be used) and immunoprecipitation (Harlow, E. and Lane, D. Antibodies: A Laboratory Manual, Cold Spring Harbor Laboratory Press, Cold Spring Harbor, N.Y., 1988) using an HA specific monoclonal antibody. Briefly, the cells are labeled for 8 hours with ³⁵S-methionine (or ³⁵S-cysteine). The culture media are then collected and the cells are lysed using detergents (RIPA buffer, 150 mM NaCl, 1% NP-40, 0.1% SDS, 0.5% DOC, 50 mM Tris, pH 7.5). Both the cell lysate and the culture media are precipitated with an HA specific monoclonal antibody. Precipitated polypeptides are then analyzed by SDS-PAGE.

[2681] Alternatively, DNA containing the human α₂δ-4 coding sequence is cloned directly into the polylinker of the pCDNA/Amp vector using the appropriate restriction sites. The resulting plasmid is transfected into COS cells in the manner described above, and the expression of the α₂δ-4 polypeptide is detected by radiolabeling and immunoprecipitation using an α₂δ-4-specific monoclonal antibody.

### X. 8099, 46455, 54414, 53763, 67076, 67102, 44181, 67084FL, AND 67084 ALT, HUMAN PROTEINS AND METHODS OF USE THEREOF

### Background of the Invention

[2682] Cellular membranes serve to differentiate the contents of a cell from the surrounding environment, and may also serve as effective barriers against the unregulated influx of hazardous or unwanted compounds, and the unregulated efflux of desirable compounds. Membranes are by nature impervious to the unfacilitated diffusion of hydrophilic compounds such as proteins, water molecules, and ions due to their structure: a bilayer of lipid molecules in which the polar head groups face outward (towards the exterior and interior of the cell) and the nonpolar tails face inward (at the center of bilayer, forming a hydrophobic core). Membranes enable a cell to maintain a relatively higher intracellular concentration of desired compounds and a relatively lower intracellular concentration of undesired compounds than are contained within the surrounding environment.

[2683] Membranes also present a structural difficulty for cells, in that most desired compounds cannot readily enter the cell, nor can most waste products readily exit the cell through this lipid bilayer. The import and export of such compounds is regulated by proteins which are embedded (singly or in complexes) in the cellular membrane. Two mechanisms exists whereby membrane proteins allow the passage of compounds: non-mediated and mediated transport. Simple diffusion is an example of non-mediated transport, while facilitated diffusion and active transport are examples of mediated transport. Permeases, porters, translocases, translocators, and transporters are proteins that engage in mediated transport (Voet and Voet (1990) Biochemistry, John Wiley and Sons, Inc., New York, N.Y. pp. 484-505).

[2684] Sugar transporters are members of the major facilitator superfamily of transporters. These transporters are passive in the sense that they are driven by the substrate concentration gradient and they exhibit distinct kinetics as well as sugar substrate specificity. Members of this family share several characteristics: (1) they contain twelve transmembrane domains separated by hydrophilic loops; (2) they have intracellular N- and C-termini; and (3) they are thought to function as oscillating pores. The transport mechanism occurs via sugar binding to the exofacial binding site of the transporter, which is thought to trigger a conformational change causing the sugar binding site to re-orient to the endofacial conformation, allowing the release of substrate. These transporters are specific for various sugars and are found in both prokaryotes and eukaryotes. In mammals, sugar transporters transport various monosaccharides across the cell membrane (Walmsley et al. (1998) Trends in Biochem. Sci. 23:476-481; Barrett et al. (1999) Curr. Op. Cell Biol. 11:496-502).

[2685] At least nine mammalian glucose transporters have been identified, GLUT1-GLUT9, which are expressed in a tissue-specific manner (e.g., in brain, erythrocyte, kidney, muscle, and adipose tissues) (Shepherd et al. (1999) N. Engl. J. Med. 341:248-257; Doege et al. (2000) Biochem. J. 350:771-776). Some GLUT proteins have been shown to be present in low amounts at the plasma membrane during the basal state, at which time large amounts are sequestered in intracellular vesicle stores. Stimulatory molecules specific for each GLUT (such as insulin) regulate the translocation of the GLUT-containing vesicles to the plasma membrane. The vesicles fuse at the membrane and subsequently expose the GLUT protein to the extracellular milieu to allow glucose (and other monosaccharide) transport into the cell (Walmsley et al. (1998) Trends in Biochem. Sci. 23:476-481; Barrett et al. (1999) Curr. Op. Cell Biol. 11:496-502). Other GLUT transporters play a role in constitutive sugar transport.

[2686] Potassium (K⁺) channels are ubiquitous proteins which are involved in the setting of the resting membrane potential as well as in the modulation of the electrical activity of cells. In excitable cells, K⁺ channels influence action potential waveforms, firing frequency, and neurotransmitter secretion (Rudy, B. (1988) Neuroscience, 25, 729-749; Hille, B. (1992) Ionic Channels of Excitable Membranes, 2nd Ed.). In non-excitable cells, they are involved in hormone secretion, cell volume regulation and potentially in cell proliferation and differentiation (Lewis et al. (1995) Annu. Rev. Immunol., 13, 623-653). Developments in electrophysiology have allowed the identification and the characterization of an astonishing variety of K⁺ channels that differ in their biophysical properties, pharmacology, regulation and tissue distribution (Rudy, B. (1988) Neuroscience, 25, 729-749; Hille, B. (1992) Ionic Channels of Excitable Membranes, 2nd Ed.). More recently, cloning efforts have shed considerable light on the mechanisms that determine this functional diversity. Furthermore, analyses of structure-function relationships have provided an important set of data concerning the molecular basis of the biophysical properties (selectivity, gating, assembly) and the pharmacological properties of cloned K⁺ channels.

[2687] Functional diversity of K⁺ channels arises mainly from the existence of a great number of genes coding for pore-forming subunits, as well as for other associated regulatory subunits. Two main structural families of pore-forming subunits have been identified. The first one consists of subunits with a conserved hydrophobic core containing six transmembrane domains (TMDs). These K⁺ channel α subunits participate in the formation of outward rectifier voltage-gated (Kv) and Ca²⁺-dependent K⁺ channels. The fourth TMD contains repeated positive charges involved in the voltage gating of these channels and hence in their outward rectification (Logothetis et al. (1992) Neuron, 8, 531-540; Bezanilla et al. (1994) Biophys. J. 66, 1011-1021).

[2688] The second family of pore-forming subunits have only two TMDs. They are essential subunits of inward-rectifying (IRK), G-protein-coupled (GIRK) and ATP-sensitive (K_{ATP}) K⁺ channels. The inward rectification results from a voltage-dependent block by cytoplasmic Mg²⁺ and polyamines (Matsuda, H. (1991) Annu. Rev. Physiol., 53, 289-298). A conserved domain, called the P domain, is present in all members of both families (Pongs, O. (1993) J. Membr. Biol., 136, 1-8; Heginbotham et al. (1994) Biophys. J. 66,1061-1067; Mackinnon, R. (1995) Neuron, 14, 889-892; Pascual et al., (1995) Neuron., and 14, 1055-1063). This domain is an essential element of the aqueous K⁺-selective pore. In both groups, the assembly of four subunits is necessary to form a functional K⁺ channel (Mackinnon, R. (1991) Nature, 350, 232-235; Yang et al., (1995) Neuron, 15, 1441-1447.

[2689] In both six TMD and two TMD pore-forming subunit families, different subunits coded by different genes can associate to form heterotetramers with new channel properties (Isacoff et al., (1990) Nature, 345, 530-534). A selective formation of heteropolymeric channels may allow each cell to develop the best K⁺ current repertoire suited to its function. Pore-forming α subunits of Kv channels are classified into different subfamilies according to their sequence similarity (Chandy et al. (1993) Trends Pharmacol. Sci., 14: 434). Tetramerization is believed to occur preferentially between members of each subgroup (Covarrubias et al. (1991) Neuron, 7, 763-773). The domain responsible for this selective association is localized in the N-terminal region and is conserved between members of the same subgroup. This domain is necessary for hetero- but not homo-multimeric assembly within a subfamily and prevents co-assembly between subfamilies. Recently, pore-forming subunits with two TMDs were also shown to co-assemble to form heteropolymers (Duprat et al. (1995) Biochem. Biophys. Res. Commun., 212, 657-663. This heteropolymerization seems necessary to give functional GIRKs. IRKs are active as homopolymers but also form heteropolymers.

[2690] New structural types of K⁺ channels were identified recently in both humans and yeast. These channels have two P domains in their functional subunit instead of only one (Ketchum et al. (1995) Nature, 376, 690-695; Lesage et al. (1996) J. Biol. Chem., 271, 4183-4187; Lesage et al. (1996) EMBO J., 15, 1004-1011; Reid et al. (1996) Receptors Channels 4, 51-62). The human channel called TWIK-1, has four TMDs. TWIK-1 is expressed widely in human tissues and is particularly abundant in the heart and the brain. TWIK-1 currents are time independent and inwardly rectifying. These properties suggest that TWIK-1 channels are involved in the control of the background K⁺ membrane conductance (Lesage et al. (1996) EMBO J., 15, 1004-1011).

[2691] Potassium channels are potassium ion selective, and can determine membrane excitability (the ability of, for example, a neuron to respond to a stimulus and convert it into an impulse). Potassium channels can also influence the resting potential of membranes, wave forms and frequencies of action potentials, and thresholds of excitation. Potassium channels are typically expressed in electrically excitable cells, e.g., neurons, muscle, endocrine, and egg cells, and may form heteromultimeric structures, e.g., composed of pore-forming and cytoplasmic subunits. Potassium channels may also be found in non-excitable cells, where they may play a role in, e.g., signal transduction. Examples of potassium channels include: (1) the voltage-gated potassium channels, (2) the ligand-gated potassium channels, e.g., neurotransmitter-gated potassium channels, and (3) cyclic-nucleotide-gated potassium channels. Voltage-gated and ligand-gated potassium channels are expressed in the brain, e.g., in brainstem monoaminergic and forebrain cholinergic neurons, where they are involved in the release of neurotransmitters, or in the dendrites of hippocampal and neocortical pyramidal cells, where they are involved in the processes of learning and memory formation. For a detailed description of potassium channels, see Kandel E. R. et al., Principles of Neural Science, second edition, (Elsevier Science Publishing Co., Inc., N.Y. (1985)), the contents of which are incorporated herein by reference.

[2692] The E1-E2 ATPase family is a large superfamily of transport enzymes that contains at least 80 members found in diverse organisms such as bacteria, archaea, and eukaryotes (Palmgren, M. G. and Axelsen, K. B. (1998) Biochim. Biophys. Acta. 1365:37-45). These enzymes are involved in ATP hydrolysis-dependent transmembrane movement of a variety of inorganic cations (e.g., H⁺, Na⁺, K⁺, Ca²⁺, Cu²⁺, Cd⁺, and Mg²⁺ ions) across a concentration gradient, whereby the enzyme converts the free energy of ATP hydrolysis into electrochemical ion gradients. E1-E2 ATPases are also known as “P-type” ATPases, referring to the existence of a covalent high-energy phosphoryl-enzyme intermediate in the chemical reaction pathway of these transporters. Until recently, the superfamily contained four major groups: Ca²⁺ transporting ATPases; Na⁺/K⁺- and gastric H⁺/K⁺ transporting ATPases; plasma membrane H⁺ transporting ATPases of plants, fungi, and lower eukaryotes; and all bacterial P-type ATPases (Kuhlbrandt et al. (1998) Curr. Opin. Struct. Biol. 8:510-516).

[2693] E1-E2 ATPases are phosphorylated at a highly conserved DKTG sequence. Phosphorylation at this site is thought to control the enzyme's substrate affinity. Most E1-E2 ATPases contain ten alpha-helical transmembrane domains, although additional domains may be present. A majority of known gated-pore translocators contain twelve alpha-helices, including Na⁺/H⁺ antiporters (West (1997) Biochim. Biophys. Acta 1331:213-234).

[2694] Members of the E1-E2 ATPase superfamily are able to generate electrochemical ion gradients which enable a variety of processes in the cell such as absorption, secretion, transmembrane signaling, nerve impulse transmission, excitation/contraction coupling, and growth and differentiation (Scarborough (1999) Curr. Op. Cell Biol. 11:517-522). These molecules are thus critical to normal cell function and well-being of the organism.

[2695] Recently, a new class of E1-E2 ATPases was identified, the aminophospholipid transporters or translocators. These transporters transport not cations, but phospholipids (Tang, X. et al. (1996) Science 272:1495-1497; Bull, L. N. et al. (1998) Nat. Genet. 18:219-224; Mauro, I. et al. (1999) Biochem. Biophys. Res. Commun. 257:333-339). These transporters are involved in cellular functions including bile acid secretion and maintenance of the asymmetrical integrity of the plasma membrane.

[2696] Given the important biological and physiological roles played by the sugar transporter family of proteins, the potassium channel family of proteins, and the E1-E2 ATPase family of proteins, there exists a need to identify novel potassium channel family members for use in a variety of diagnostic/prognostic, as well as therapeutic applications

### SUMMARY OF THE INVENTION

[2697] The present invention is based, at least in part, on the discovery of novel human sugar transporter family members, referred to herein as “8099 and 46455” nucleic acid and polypeptide molecules. The 8099 and 46455 nucleic acid and polypeptide molecules of the present invention are useful as modulating agents in regulating a variety of cellular processes, e.g., sugar homeostasis. Accordingly, in one aspect, this invention provides isolated nucleic acid molecules encoding 8099 and 46455 polypeptides or biologically active portions thereof, as well as nucleic acid fragments suitable as primers or hybridization probes for the detection of 8099 and 46455-encoding nucleic acids.

[2698] The present invention is also based, at least in part, on the discovery of novel potassium channel family members, referred to herein as “54414 and 53763” nucleic acid and polypeptide molecules. The 54414 and 53763 nucleic acid and protein molecules of the present invention are useful as modulating agents in regulating a variety of cellular processes, e.g., gene expression, intra- or intercellular signaling, and/or membrane excitability or conductance. Accordingly, in one aspect, this invention provides isolated nucleic acid molecules encoding 54414 and 53763 proteins or biologically active portions thereof, as well as nucleic acid fragments suitable as primers or hybridization probes for the detection of 54414 and 53763-encoding nucleic acids.

[2699] The present invention is also based, at least in part, on the discovery of novel human phospholipid transporter family members, referred to herein as “67076, 67102, 44181, 67084FL, or 67084alt” nucleic acid and polypeptide molecules. The 67076, 67102, 44181, 67084FL, or 67084alt nucleic acid and polypeptide molecules of the present invention are useful as modulating agents in regulating a variety of cellular processes, e.g., phospholipid transport (e.g., aminophospholipid transport), absorption, secretion, gene expression, intra- or inter-cellular signaling, and/or cellular proliferation, growth, apoptosis, and/or differentiation. Accordingly, in one aspect, this invention provides isolated nucleic acid molecules encoding 67076, 67102, 44181, 67084FL, or 67084alt polypeptides or biologically active portions thereof, as well as nucleic acid fragments suitable as primers or hybridization probes for the detection of 67076, 67102, 44181, 67084FL, or 67084alt-encoding nucleic acids.

[2700] In one embodiment, the invention features an isolated nucleic acid molecule that includes the nucleotide sequence set forth in SEQ ID NO:46, 48, 49, 51, 52, 54, 55, 57, 58, 60, 61, 63, 64, 66, 67, 69, 70, or 72. In another embodiment, the invention features an isolated nucleic acid molecule that encodes a polypeptide including the amino acid sequence set forth in SEQ ID NO:47, 50, 53, 56, 59, 62, 65, 68, or 71. In another embodiment, the invention features an isolated nucleic acid molecule that includes the nucleotide sequence contained in the plasmid deposited with ATCC® as Accession Number ______, ______, ______, ______, or ______.

[2701] In still other embodiments, the invention features isolated nucleic acid molecules including nucleotide sequences that are substantially identical (e.g., 60% identical) to the nucleotide sequence set forth as SEQ ID NO:46, 48, 49, 51, 52, 54, 55, 57, 58, 60, 61, 63, 64, 66, 67, 69, 70, or 72. The invention further features isolated nucleic acid molecules including at least 50 contiguous nucleotides of the nucleotide sequence set forth as SEQ ID NO:46, 48, 49, 51, 52, 54, 55, 57, 58, 60, 61, 63, 64, 66, 67, 69, 70, or 72. In another embodiment, the invention features isolated nucleic acid molecules which encode a polypeptide including an amino acid sequence that is substantially identical (e.g., 60% identical) to the amino acid sequence set forth as SEQ ID NO:47, 50, 53, 56, 59, 62, 65, 68, or 71. The present invention also features nucleic acid molecules which encode allelic variants of the polypeptide having the amino acid sequence set forth as SEQ ID NO:47, 50, 53, 56, 59, 62, 65, 68, or 71. In addition to isolated nucleic acid molecules encoding full-length polypeptides, the present invention also features nucleic acid molecules which encode fragments, for example, biologically active or antigenic fragments, of the full-length polypeptides of the present invention (e.g., fragments including at least 10 contiguous amino acid residues of the amino acid sequence of SEQ ID NO:47, 50, 53, 56, 59, 62, 65, 68, or 71). In still other embodiments, the invention features nucleic acid molecules that are complementary to, antisense to, or hybridize under stringent conditions to the isolated nucleic acid molecules described herein.

[2702] In another aspect, the invention provides vectors including the isolated nucleic acid molecules described herein (e.g., 8099, 46455, 54414, 53763, 67076, 67102, 44181, 67084FL, or 67084alt-encoding nucleic acid molecules). Such vectors can optionally include nucleotide sequences encoding heterologous polypeptides. Also featured are host cells including such vectors (e.g., host cells including vectors suitable for producing 8099, 46455, 54414, 53763, 67076, 67102, 44181, 67084FL, or 67084alt nucleic acid molecules and polypeptides).

[2703] In another aspect, the invention features isolated 8099, 46455, 54414, 53763, 67076, 67102, 44181, 67084FL, or 67084alt polypeptides and/or biologically active or antigenic fragments thereof. Exemplary embodiments feature a polypeptide including the amino acid sequence set forth as SEQ ID NO:47, 50, 53, 56, 59, 62, 65, 68, or 71, a polypeptide including an amino acid sequence at least 60% identical to the amino acid sequence set forth as SEQ ID NO:47, 50, 53, 56, 59, 62, 65, 68, or 71, a polypeptide encoded by a nucleic acid molecule including a nucleotide sequence at least 60% identical to the nucleotide sequence set forth as SEQ ID NO:46, 48, 49, 51, 52, 54, 55, 57, 58, 60, 61, 63, 64, 66, 67, 69, 70, or 72. Also featured are fragments of the full-length polypeptides described herein (e.g., fragments including at least 10 contiguous amino acid residues of the sequence set forth as SEQ ID NO:47, 50, 53, 56, 59, 62, 65, 68, or 71) as well as allelic variants of the polypeptide having the amino acid sequence set forth as SEQ ID NO:47, 50, 53, 56, 59, 62, 65, 68, or 71.

[2704] The 8099 and 46455 polypeptides and/or biologically active or antigenic fragments thereof, are useful, for example, as reagents or targets in assays applicable to treatment and/or diagnosis of 8099 and 46455 mediated or related disorders. In one embodiment, 8099 and/or 46455 polypeptides or fragments thereof, have an 8099 and/or 46455 activity. In another embodiment, 8099 and/or 46455 polypeptides or fragments thereof, have at least one, preferably two, three, four, five, six, seven, eight, nine, ten, eleven, or twelve transmembrane domains and/or a sugar transporter family domain, and optionally, have an 8099 and/or 46455 activity.

[2705] The 54414 and 53763 polypeptides and/or biologically active or antigenic fragments thereof, are useful, for example, as reagents or targets in assays applicable to treatment and/or diagnosis of 54414 and 53763 mediated or related disorders. In one embodiment, a 54414 AND 53763 polypeptide or fragment thereof has a 54414 and 53763 activity. In another embodiment, a 54414 and 53763 polypeptide or fragment thereof has at least one or more of the following domains or motifs: a transmembrane domain, an ion transport protein domain, a K⁺ channel tetramerization domain, a P-loop motif, a pore domain, a potassium channel signature sequence motif, and/or a voltage sensor motif, and optionally, has a 54414 or 53763 activity.

[2706] The 67076, 67102, 44181, 67084FL, or 67084alt polypeptides and/or biologically active or antigenic fragments thereof, are useful, for example, as reagents or targets in assays applicable to treatment and/or diagnosis of 67076, 67102, 44181, 67084FL, or 67084alt associated or related disorders. In one embodiment, a 67076, 67102, 44181, 67084FL, or 67084alt polypeptide or fragment thereof, has a 67076, 67102, 44181, 67084FL, or 67084alt activity. In another embodiment, a 67076, 67102, 44181, 67084FL, or 67084alt polypeptide or fragment thereof, includes at least one of the following domains, sites, or motifs: a transmembrane domain, an N-terminal large extramembrane domain, a C-terminal large extramembrane domain, an E1-E2 ATPases phosphorylation site, a P-type ATPase sequence 1 motif, a P-type ATPase sequence 2 motif, a P-type ATPase sequence 3 motif, and/or one or more phospholipid transporter specific amino acid resides, and optionally, has a 67076, 67102, 44181, 67084FL, or 67084alt activity.

[2707] In a related aspect, the invention features antibodies (e.g., antibodies which specifically bind to any one of the polypeptides described herein) as well as fusion polypeptides including all or a fragment of a polypeptide described herein.

[2708] The present invention further features methods for detecting 8099, 46455, 54414, 53763, 67076, 67102, 44181, 67084FL, or 67084alt polypeptides and/or 8099, 46455, 54414, 53763, 67076, 67102, 44181, 67084FL, or 67084alt nucleic acid molecules, such methods featuring, for example, a probe, primer or antibody described herein. Also featured are kits, e.g., kits for the detection of 8099, 46455, 54414, 53763, 67076, 67102, 44181, 67084FL, or 67084alt polypeptides and/or 8099, 46455, 54414, 53763, 67076, 67102, 44181, 67084FL, or 67084alt nucleic acid molecules. In a related aspect, the invention features methods for identifying compounds which bind to and/or modulate the activity of a 8099, 46455, 54414, 53763, 67076, 67102, 44181, 67084FL, or 67084alt polypeptide or 8099, 46455, 54414, 53763, 67076, 67102, 44181, 67084FL, or 67084alt nucleic acid molecule described herein. Further featured are methods for modulating a 67076, 67102, 44181, 67084FL, or 67084alt activity.

[2709] Other features and advantages of the invention will be apparent from the following detailed description and claims.

### Detailed Description of the Invention

[2710] The present invention is based, at least in part, on the discovery of novel sugar transporter family molecules, referred to herein as “8099 and 46455” nucleic acid and polypeptide molecules. These novel molecules are capable of, for example, modulating a transporter mediated activity (e.g., a sugar transporter mediated activity) in a cell, e.g., a liver cell, fat cell, muscle cell, or blood cell, such as an erythrocyte. These novel molecules are capable of transporting molecules, e.g., hexoses such as D-glucose, D-fructose, D-galactose or mannose across biological membranes and, thus, play a role in or function in a variety of cellular processes, e.g., maintenance of sugar homeostasis. Thus the 8099 and 46455 molecules of the present invention provide novel diagnostic targets and therapeutic agents to control 8099 and 46455-associated disorders, as defined herein.

[2711] The present invention is also based, at least in part, on the discovery of novel potassium channel family members, referred to herein as “54414 and 53763” nucleic acid and polypeptide molecules. These novel molecules are capable of, for example, modulating PCH mediated activities in a cell, e.g., a neuronal cell. Thus, the 54414 and 53763 molecules of the present invention provide novel diagnostic targets and therapeutic agents to control 54414 or 53763-associated disorders, as defined herein.

[2712] The present invention also is based, at least in part, on the discovery of novel phospholipid transporter family molecules, referred to herein as “67076, 67102, 44181, 67084FL, or 67084alt” nucleic acid and polypeptide molecules. These novel molecules are capable of, for example, transporting phospholipids (e.g., aminophospholipids such as phosphatidylserine and phosphatidylethanolamine, choline phospholipids such as phosphatidylcholine and sphingomyelin, and bile acids) across cellular membranes and, thus, play a role in or function in a variety of cellular processes, e.g., phospholipid transport, absorption, secretion, gene expression, intra- or inter-cellular signaling, and/or cellular proliferation, growth, and/or differentiation. Thus, the 67076, 67102, 44181, 67084FL, and 67084alt molecules of the present invention provide novel diagnostic targets and therapeutic agents to control 67076, 67102, 44181, 67084FL, or 67084alt-associated disorders, as defined herein.

[2713] The term “family” when referring to the protein and nucleic acid molecules of the invention is intended to mean two or more proteins or nucleic acid molecules having a common structural domain or motif and having sufficient amino acid or nucleotide sequence homology as defined herein. Such family members can be naturally or non-naturally occurring and can be from either the same or different species. For example, a family can contain a first protein of human origin as well as other distinct proteins of human origin or alternatively, can contain homologues of non-human origin, e.g., rat or mouse proteins. Members of a family can also have common functional characteristics.

[2714] 8099 and 46455 Molecules of the Invention

[2715] The family of 8099 and 46455 polypeptides comprise at least one “transmembrane domain” and at least one, preferably two, three, four, five, six, seven, eight, nine, ten, eleven, or twelve transmembrane domains. As used herein, the term “transmembrane domain” includes an amino acid sequence of about 20-45 amino acid residues in length which spans the plasma membrane. More preferably, a transmembrane domain includes about at least 20, 25, 30, 35, 40, or 45 amino acid residues and spans the plasma membrane. Transmembrane domains are rich in hydrophobic residues, and typically have an alpha-helical structure. In a preferred embodiment, at least 50%, 60%, 70%, 80%, 90%, 95% or more of the amino acids of a transmembrane domain are hydrophobic, e.g., leucines, isoleucines, alanines, valines, phenylalanines, prolines or methionines. Transmembrane domains are described in, for example, Zagotta W. N. et al, (1996) Annual Rev. Neurosci. 19: 235-263, the contents of which are incorporated herein by reference. A MEMSAT and additional analyses resulted in the identification of twelve transmembrane domains in the amino acid sequence of human 8099 (SEQ ID NO:47) at about residues 32-49, 81-101, 109-130, 138-156, 165-184, 198-217, 279-301, 315-338, 346-364, 463-487, 499-521, and 529-549. A MEMSAT and additional analyses resulted in the identification of twelve transmembrane domains in the amino acid sequence of human 46455 (SEQ ID NO:50) at about residues 58-74, 98-118, 126-145, 165-181, 188-205, 218-238, 273-294, 323-341, 357-377, 386-410, 423-441, and 462-485.

[2716] Accordingly, 8099 and 46455 polypeptides having at least 50-60% homology, preferably about 60-70%, more preferably about 70-80%, or about 80-90% homology with at least one, preferably at least two, three, four, five, six, seven, eight, nine, ten, eleven, or twelve transmembrane domains of human 8099 and 46455, respectively are within the scope of the invention.

[2717] Another embodiment of the invention features 8099 molecules which contain an N-terminal unique domain. The term “unique N-terminal domain” as used herein, refers to a protein domain of an 8099 protein family member which includes amino acid residues N-terminal to the sixth transmembrane domain, e.g., the GLUT8-like domain in the amino acid sequence of the 8099 protein. As used herein, a “unique N-terminal domain” refers to a protein domain which is at least about 150-200 amino acid residues in length, preferably at least about 160-190 amino acid residues in length and shares significantly more sequence homology with about residues 1 to 178 of SEQ ID NO:47 than with about residues 1 to 178 of GLUT8.

[2718] Accordingly, 8099 polypeptides having at least 50-60% homology, preferably about 60-70%, more preferably about 70-80%, or about 80-90% homology with at least one unique N-terminal domain of human 8099 (e.g., about amino acids 1-178 of SEQ ID NO:47) are within the scope of the invention.

[2719] Yet another aspect of the invention features 8099 proteins having an “extended exofacial loop” between transmembrane domains 9 and 10. Preferably, the first amino acid residue of an extended exofacial loop of 8099 is the first residue C-terminal to the amino acid residues of transmembrane domain 9 and the last residue of the exofacial loop is the first residue N-terminal to the amino acid residues of transmembrane domain 10 of 8099. In a preferred embodiment, an extended exofacial loop is at least about 50-55, 55-60, 60-65, 65-70, 70-75, 75-80, 80-85, 85-90, 90-95, 97 or more amino acid residues in length. For example, in one embodiment, an 8099 protein includes an “extended exofacial loop” of about amino acids 365-462 of SEQ ID NO:47 (97 amino acid residues in length).

[2720] Accordingly, 8099 polypeptides having at least 50-60% homology, preferably about 60-70%, more preferably about 70-80%, or about 80-90% homology with at least one extended exofacial loop of human 8099 are within the scope of the invention.

[2721] In another embodiment, an 8099 and/or 46455 molecule of the present invention is identified based on the presence of at least one “sugar transporter family domain.” As used herein, the term “sugar transporter family domain” includes a protein domain having at least about 300-600 amino acid residues and a sugar transporter mediated activity. Preferably, a sugar transporter family domain includes a polypeptide having an amino acid sequence of about 350-550, 400-550, or more preferably, about 411 or 521 amino acid residues and a sugar transporter mediated activity. To identify the presence of a sugar transporter family domain in an 8099 and/or an 46455 protein, and make the determination that a protein of interest has a particular profile, the amino acid sequence of the protein may be searched against a database of known protein domains (e.g., the PFAM HMM database). A PFAM sugar transporter family domain has been assigned the PFAM Accession PF00083. A search was performed against the PFAM HMM database resulting in the identification of a sugar transporter family domain in the amino acid sequence of human 8099 (SEQ ID NO:47) at about residues 43-564 of SEQ ID NO:47. A search was performed against the PFAM HMM database resulting in the identification of a sugar transporter family domain in the amino acid sequence of human 46455 (SEQ ID NO:50) at about residues 58-487 of SEQ ID NO:50.

[2722] Preferably a “sugar transporter family domain” has a “sugar transporter mediated activity” as described herein. For example, a sugar transporter family domain may have the ability to bind a monosaccharide (e.g., D-glucose, D-fructose, D-galactose and/or mannose); the ability to transport a monosaccharide (e.g., D-glucose, D-fructose, D-galactose and/or mannose) in a constitutive manner or in response to stimuli (e.g., insulin) across a cell membrane (e.g., a liver cell membrane, fat cell membrane, muscle cell membrane, and/or blood cell membrane, such as an erythrocyte membrane); the ability to function as a neuronal transporter; the ability to mediate trans-epithelial movement; and/or the ability to modulate sugar homeostasis in a cell. Accordingly, identifying the presence of a “sugar transporter family domain” can include isolating a fragment of an 8099 and/or an 46455 molecule (e.g., an 8099 and/or an 46455 polypeptide) and assaying for the ability of the fragment to exhibit one of the aforementioned sugar transporter mediated activities.

[2723] A description of the Pfam database can be found in Sonhammer et al. (1997) Proteins 28:405-420 and a detailed description of HMMs can be found, for example, in Gribskov et al. (1990) Meth. Enzymol. 183:146-159; Gribskov et al. (1987) Proc. Natl. Acad. Sci. USA 84:4355-4358; Krogh et al.(1994) J. Mol. Biol. 235:1501-1531; and Stultz et al.(1993) Protein Sci. 2:305-314, the contents of which are incorporated herein by reference.

[2724] In a preferred embodiment, the 8099 and/or 46455 molecules of the invention include at least one, preferably two, even more preferably at least three, four, five, six, seven, eight, nine, ten, eleven, or twelve transmembrane domain(s) and/or at least one sugar transporter family domain. In another preferred embodiment, the 8099 molecules of the invention include at least one, preferably two, even more preferably at least three, four, five, six, seven, eight, nine, ten, eleven, or twelve transmembrane domain(s), at least one sugar transporter family domain, at least one unique N-terminal domain, and/or at least one extended exofacial loop.

[2725] Isolated polypeptides of the present invention, preferably 8099 or 46455 polypeptides, have an amino acid sequence sufficiently identical to the amino acid sequence of SEQ ID NO:47 or 50 or are encoded by a nucleotide sequence sufficiently identical to SEQ ID NO: SEQ ID NO:46, 48, 49, or 51. As used herein, the term “sufficiently identical” refers to a first amino acid or nucleotide sequence which contains a sufficient or minimum number of identical or equivalent (e.g., an amino acid residue which has a similar side chain) amino acid residues or nucleotides to a second amino acid or nucleotide sequence such that the first and second amino acid or nucleotide sequences share common structural domains or motifs and/or a common functional activity. For example, amino acid or nucleotide sequences which share common structural domains having at least 50%, 55%, 60%, 65%, 70%, 75%, 80%, 85%, 85%, 90%, 95%, 96%, 97%, 98%, 99% or more homology or identity across the amino acid sequences of the domains and contain at least one and preferably two structural domains or motifs, are defined herein as sufficiently identical. Furthermore, amino acid or nucleotide sequences which share at least 50%, 55%, 60%, 65%, 70%, 75%, 80%, 85%, 85%, 90%, 95%, 96%, 97%, 98%, 99% or more homology or identity and share a common functional activity are defined herein as sufficiently identical.

[2726] In a preferred embodiment, an 8099 and/or 46455 polypeptide includes at least one or more of the following domains: a transmembrane domain and/or a sugar transporter family domain, and has an amino acid sequence at least about 50%, 55%, 60%, 65%, 70%, 75%, 80%, 85%, 85%, 90%, 95%, 96%, 97%, 98%, 99% or more homologous or identical to the amino acid sequence of SEQ ID NO:47 or 50, or the amino acid sequences encoded by the DNA inserts of the plasmids deposited with ATCC as Accession Numbers ______ and/or ______. In yet another preferred embodiment, an 8099 and/or an 46455 polypeptide includes at least one or more of the following domains: a transmembrane domain and/or a sugar transporter family domain, and is encoded by a nucleic acid molecule having a nucleotide sequence which hybridizes under stringent hybridization conditions to a complement of a nucleic acid molecule comprising the nucleotide sequence of SEQ ID NO:46, 48, 49, or 51. In another preferred embodiment, an 8099 and/or an 46455 polypeptide includes at least one or more of the following domains: a transmembrane domain and/or a sugar transporter family domain, and has an 8099 and/or an 46455 activity.

[2727] As used interchangeably herein, an “8099 activity”, “46455 activity”, “biological activity of 8099”, “biological activity of 46455”, “functional activity of 8099” or “functional activity of 46455” refers to an activity exerted by an 8099 and/or 46455 polypeptide or nucleic acid molecule on an 8099 and/or 46455 responsive cell or tissue, or on an 8099 and/or 46455 polypeptide substrate, as determined in vivo, or in vitro, according to standard techniques. In one embodiment, an 8099 and/or 46455 activity is a direct activity, such as an association with an 8099- and/or 46455-target molecule. As used herein, a “substrate,” “target molecule,” or “binding partner” is a molecule with which an 8099 and/or 46455 polypeptide binds or interacts in nature, such that 8099- and/or 46455-mediated function is achieved. An 8099 and/or 46455 target molecule can be a non-8099 and/or a non-46455 molecule or an 8099 and/or 46455 polypeptide or polypeptide of the present invention. In an exemplary embodiment, an 8099 and/or 46455 target molecule is an 8099 and/or 46455 ligand, e.g., a sugar transporter ligand such D-glucose, D-fructose, D-galactose, and/or mannose. Alternatively, an 8099 and/or 46455 activity is an indirect activity, such as a cellular signaling activity mediated by interaction of the 8099 and/or 46455 polypeptide with an 8099 and/or 46455 ligand. The biological activities of 8099 and/or 46455 are described herein. For example, the 8099 and/or 46455 polypeptides of the present invention can have one or more of the following activities: (1) bind a monosaccharide, e.g., D-glucose, D-fructose, D-galactose, and/or mannose, (2) transport monosaccharides across a cell membrane, (3) influence insulin and/or glucagon secretion, (4) maintain sugar homeostasis in a cell, (5) function as a neuronal transporter, and (6) mediate trans-epithelial movement in a cell. Moreover, in a preferred embodiment, 8099 and/or 46455 molecules of the present invention, 8099 and/or 46455 antibodies, 8099 and/or 46455 modulators are useful in at least one of the following: (1) modulation of insulin sensitivity; (2) modulation of blood sugar levels; (3) treatment of blood sugar level disorders (e.g., diabetes); and/or (4) modulation of insulin resistance.

[2728] The nucleotide sequence of the isolated human 8099 and 46455 cDNAs and the predicted amino acid sequences of the human 8099 and 46455 polypeptides are shown in FIGS. 44A-D and 51A-D and in SEQ ID NOs:46 and 47, and SEQ ID NOs:49 and 50, respectively. Plasmids containing the nucleotide sequences encoding human 8099 or 46455 were deposited with the American Type Culture Collection (ATCC), 10801 University Boulevard, Manassas, Va. 20110-2209, on ______ and assigned Accession Numbers ______ or ______. These deposits will be maintained under the terms of the Budapest Treaty on the International Recognition of the Deposit of Microorganisms for the Purposes of Patent Procedure. These deposits were made merely as a convenience for those of skill in the art and are not an admission that a deposit is required under 35 U.S.C. §112.

[2729] The human 8099 gene, which is approximately 2725 nucleotides in length, encodes a polypeptide which is approximately 617 amino acid residues in length. The human 46455 gene, which is approximately 2230 nucleotides in length, encodes a polypeptide which is approximately 528 amino acid residues in length.

[2730] 54414 and 53763 Molecules of the Invention

[2731] The family of 54414 and 53763 proteins of the present invention comprises at least one transmembrane domain, preferably at least 2 or 3 transmembrane domains, more preferably 4 or 5 transmembrane domains, and most preferably, 6 transmembrane domains. Amino acid residues 64-83, 104-127, 135-153, 161-173, 199-217, and 257-274 of the human 54414 protein (SEQ ID NO:53) are predicted to comprise transmembrane domains. Amino acid residues 230-248, 287-303, 314-335, 346-368, 382-402, and 451-473 of the human 53763 protein (SEQ ID NO:56) are predicted to comprise transmembrane domains.

[2732] In another embodiment, members of the 54414 and 53763 family of proteins include at least one “ion transport protein domain” in the protein or corresponding nucleic acid molecule. As used herein, the term “ion transport protein domain” includes a protein domain having at least about 150-310 amino acid residues and a bit score of at least 200 when compared against an ion transport protein domain Hidden Markov Model (HMM), e.g., PFAM Accession Number PF00520. Preferably, an ion transport protein domain includes a protein domain having an amino acid sequence of about 170-290, 190-270, 210-250, or more preferably about 173 or 191 amino acid residues. To identify the presence of an ion transport protein domain in a 54414 or 53763 protein, and make the determination that a protein of interest has a particular profile, the amino acid sequence of the protein is searched against a database of known protein motifs and/or domains (e.g., the HMM database). The ion transport protein domain (HMM) has been assigned the PFAM Accession number PF00520. A search was performed against the HMM database resulting in the identification of an ion transport protein domain in the amino acid sequence of human 54414 at about residues 104-277 of SEQ ID NO:53 and in the amino acid sequence of human 53763 about residues 281-472 of SEQ ID NO:56.

[2733] Preferably an ion transport protein domain is at least about 150-310 amino acid residues and has an “ion transport protein domain activity”, for example, the ability to interact with a 54414 or 53763 substrate or target molecule (e.g., a potassium ion) and/or to regulate 54414 or 53763 activity. Accordingly, identifying the presence of an “ion transport protein domain” can include isolating a fragment of a 54414 or 53763 molecule (e.g., a 54414 or 53763 polypeptide) and assaying for the ability of the fragment to exhibit one of the aforementioned ion transport protein domain activities.

[2734] In another embodiment, members of the 54414 and 53763 family of proteins include at least one “K⁺ channel tetramerization domain” in the protein or corresponding nucleic acid molecule. As used herein, the term “K⁺ channel tetramerization domain” includes a protein domain having at least about 70-230 amino acid residues and a bit score of at least 80 when compared against a K⁺ channel tetramerization domain Hidden Markov Model (HMM), e.g., PFAM Accession Number PF02214. Preferably, a K⁺ channel tetramerization domain includes a protein domain having an amino acid sequence of about 90-210, 110-190, 130-170, or more preferably about 149 amino acid residues, and a bit score of at least 100, 120, 140, or more preferably, 156.7. To identify the presence of a K⁺ channel tetramerization domain in a 54414 or 53763 protein, and make the determination that a protein of interest has a particular profile, the amino acid sequence of the protein is searched against a database of known protein motifs and/or domains (e.g., the HMM database). The K⁺ channel tetramerization domain (HMM) has been assigned the PFAM Accession number PF02214. A search was performed against the HMM database resulting in the identification of a K⁺ channel tetramerization domain in the amino acid sequence of human 53763 at about residues 8-156 of SEQ ID NO:56.

[2735] Preferably a K⁺ channel tetramerization domain is at least about 70-230 amino acid residues and has an “K⁺ channel tetramerization domain activity”, for example, the ability to interact with one or more potassium channel subunits (e.g., 54414 or 53763 molecules, or non-54414 or 53763 potassium channel subunits), the ability to regulate assembly of a 54414 or 53763 molecule into a potassium channel tetramer, and/or to regulate 54414 or 53763 activity. Accordingly, identifying the presence of an “K⁺ channel tetramerization domain” can include isolating a fragment of a 54414 or 53763 molecule (e.g., a 54414 or 53763 polypeptide) and assaying for the ability of the fragment to exhibit one of the aforementioned K⁺ channel tetramerization domain activities.

[2736] In another embodiment, a 54414 or 53763 protein of the present invention is identified based on the presence of an “ATP/GTP-binding sit motif A (P-loop) motif”, referred to alternatively herein as a “P-loop motif”, in the protein or corresponding nucleic acid molecule. Preferably, a P-loop motif includes a protein motif which is about 4-15, 5-13, 6-11, 7-9, or preferably about 8 amino acid residues. The P-loop motif functions in binding ATP and/or GTP via interaction with the phosphate groups of the nucleotide and has been assigned Prosite™ Accession Number PS00017. To identify the presence of a P-loop motif in a 54414 or 53763 protein, and to make the determination that a protein of interest has a particular profile, the amino acid sequence of the protein may be searched against a database of known protein domains or motifs (e.g., the Prosite™ database) using the default parameters (available at the ProSite website). A search was performed against the ProSite database resulting in the identification of a P-loop motif in the amino acid sequence of human 54414 (SEQ ID NO:53) at about residues 1007-1014.

[2737] In another embodiment, a 54414 or 53763 protein of the present invention is identified based on the presence of a “pore domain”, alternatively referred to herein as a “P-region domain”, in the protein or corresponding nucleic acid molecule. As used interchangeably herein, the terms “pore domain” and “P-region domain” include a protein domain having about 10-30, 12-28, 13-25, 14-24, 15-23, or preferably about 16-22 amino acid residues, which is involved in lining the potassium channel pore. A pore domain is typically found between transmembrane domains of potassium channels and is believed to be a major determinant of ion selectivity in potassium channels. Preferably, a pore domain includes a potassium channel signature motif, as defined herein. Pore domains are described in, for example, Warmke et al. (1991) Science 252:1560-1562; Zagotta W. N. et al. (1996) Annu. Rev. Neurosci. 19:235-63; Pongs, O. (1993) J. Membr. Biol. 136:1-8; Heginbotham et al. (1994) Biophys. J. 66:1061-1067; Mackinnon, R. (1995) Neuron 14:889-892; and Pascual et al. (1995) Neuron 14:1055-1063), the contents of which are incorporated herein by reference. A pore domain was identified in the amino acid sequence of human 54414 at about residues 229-250 of SEQ ID NO:53. A pore domain was identified in the amino acid sequence of human 53763 at about residues 426-441 of SEQ ID NO:56.

[2738] In a further embodiment, a 54414 or 53763 protein of the present invention is identified based on the presence of a “potassium channel signature sequence motif” in the protein or corresponding nucleic acid molecule. As used herein, the term “potassium channel signature sequence motif” includes a protein motif which is diagnostic for potassium channels. Preferably, a potassium channel signature sequence motif has the consensus sequence T-X-X-T-X-G-hydrophobic-G (see Joiner, W. J. et al. (1998) Nat. Neurosci. 1:462-469 and references cited therein), wherein “X” indicates any amino acid residue, and “hydrophobic” indicates any hydrophobic amino acid residue. Preferably, a potassium channel signature sequence motif is included within a pore domain and includes at least 1, 2, 3, 4, 5, 6, 7, or more preferably, 8 amino acid residues that match the consensus sequence for a potassium channel signature sequence motif. A potassium channel signature sequence motif was identified in the amino acid sequence of human 54414 at about residues 239-246 of SEQ ID NO:53. A potassium channel signature sequence motif was identified in the amino acid sequence of human 53763 at about residues 436-441 of SEQ ID NO:56.

[2739] In still another embodiment, a 54414 or 53763 protein of the present invention is identified based on the presence of a “voltage sensor motif”, alternatively referred to simply as a “voltage sensor”, in the protein or the corresponding nucleic acid molecule. As used interchangeably herein, the terms “voltage sensor motif” and “voltage sensor” include a protein motif having about 10-30, 11-26, 12-24, 13-22, 14-20, 15-18, or more preferably 16 amino acid residues, which is involved in sensing voltage differences between the two sides of the plasma membrane of a cell. Preferably, a voltage sensor motif includes at least 1, 2, 3, 4, 5, or more preferably, 6 positively charged amino acid residues, which are preferably spaced apart by at least 1, or preferably 2, non-positively charged amino acid residues. Preferably, a voltage sensor motif is included within and/or overlaps with a transmembrane domain, more preferably the fourth transmembrane, of the 54414 or 53763 protein in which it is found. A voltage sensor motif was identified in the amino acid sequence of human 53763 at about residues 348-363 of SEQ ID NO:53. The positively charged amino acid residues of the human 53763 voltage sensor were identified at about residues 348, 351, 354, 357, 360, and 363 of SEQ ID NO:53. No voltage sensor was identified in human 54414.

[2740] Isolated proteins of the present invention, preferably 54414 or 53763 proteins, have an amino acid sequence sufficiently homologous to the amino acid sequence of SEQ ID NO:53 or SEQ ID NO:56, or are encoded by a nucleotide sequence sufficiently homologous to SEQ ID NO:52, 54, 55, or 57. Amino acid or nucleotide sequences which share common structural domains having at least 50%, 55%, 60%, 65%, 70%, 75%, 80%, 85%, 85%, 90% 95%, 96%, 97%, 98%, 99% or more homology or identity across the amino acid sequences of the domains and contain at least one and preferably two structural domains or motifs, are defined herein as sufficiently homologous. Furthermore, amino acid or nucleotide sequences which share at least 50%, 55%, 60%, 65%, 70%, 75%, 80%, 85%, 85%, 90%, 95%, 96%, 97%, 98%, 99% or more homology or identity and share a common functional activity are defined herein as sufficiently homologous.

[2741] In a preferred embodiment, a 54414 or 53763 protein includes at least one or more of the following domains or motifs: a transmembrane domain, an ion transport protein domain, a K⁺ channel tetramerization domain, a P-loop motif, a pore domain, a potassium channel signature sequence motif, and/or a voltage sensor motif. and has an amino acid sequence at least about 50%, 55%, 60%, 65%, 70%, 75%, 80%, 85%, 85%, 90%, 95% 96%, 97%, 98%, 99% or more homologous or identical to the amino acid sequence of SEQ ID NO:53 or 56, or the amino acid sequence encoded by the DNA insert of the plasmid deposited with ATCC as Accession Number ______ or _______. In yet another preferred embodiment, a 54414 or 53763 protein includes at least one or more of the following domains or motifs: a transmembrane domain, an ion transport protein domain, a K⁺ channel tetramerization domain, a P-loop motif, a pore domain, a potassium channel signature sequence motif, and/or a voltage sensor motif, and is encoded by a nucleic acid molecule having a nucleotide sequence which hybridizes under stringent hybridization conditions to a complement of a nucleic acid molecule comprising the nucleotide sequence of SEQ ID NO:52, 54, 55, or 57. In another preferred embodiment, a 54414 or 53763 protein includes at least one or more of the following domains or motifs: a transmembrane domain, an ion transport protein domain, a K⁺ channel tetramerization domain, a P-loop motif, a pore domain, a potassium channel signature sequence motif, and/or a voltage sensor motif, and has a 54414 or 53763 activity.

[2742] As used interchangeably herein, a “54414 or 53763 activity”, “biological activity of 54414 or 53763” or “functional activity of 54414 or 53763”, includes an activity exerted or mediated by a 54414 or 53763 protein, polypeptide or nucleic acid molecule when expressed in a cell or on a membrane, as determined in vivo or in vitro, according to standard techniques. In one embodiment, a 54414 or 53763 activity is a direct activity, such as transport of a 54414 or 53763 substrate (e.g., a potassium ion). In another embodiment, a 54414 or 53763 activity is an indirect activity mediated, for example, by interaction of a 54414 or 53763 molecule with a 54414 or 53763 target molecule or binding partner. As used herein, a “target molecule” or “binding partner” is a molecule with which a 54414 or 53763 protein binds or interacts in nature, such that function of the target molecule or binding partner is modulated. In an exemplary embodiment, a 54414 or 53763 target molecule or binding partner is a 54414 or 53763 polypeptide or a non-54414 or 53763 potassium channel subunit.

[2743] In a preferred embodiment, a 54414 or 53763 activity is at least one of the following activities: (i) interaction with a 54414 or 53763 substrate (e.g., a potassium ion or a cyclic nucleotide); (ii) conductance or transport of a 54414 or 53763 substrate across a cellular membrane; (iii) interaction with a second protein (e.g., a second 54414 or 53763 subunit or a non-54414 or 53763 potassium channel subunit); (iv) modulation (e.g., maintenance and/or rectification) of membrane potentials; (v) regulation of target molecule availability or activity; (vi) modulation of intra- or intercellular signaling and/or gene transcription (e.g., either directly or indirectly); (viii) generation of outwardly rectifying currents; (viii) modulation of membrane excitability; (ix) modulation of the release of neurotransmitters; (x) regulation of contractility (e.g., of smooth muscle cells), secretion, and/or synaptic transmission; and/or (xi) modulation of processes which underlie learning and memory.

[2744] Preferred activities of 54414 further include at least one of the following activities: (i) interaction with maxi-K potassium channels (i.e., large conductance channels, in particular Slo); (ii) modulation of maxi-K potassium channel activity (e.g., Slo-mediated activities); (iii) generation of intermediate conductance channels; and/or (iv) regulation of contractility (e.g., of smooth muscle cells), secretion, and/or synaptic transmission, in particular, via modulation of Slo.

[2745] Preferred activities of 53763 further include at least one of the following activities: (i) interaction with Shaker (Sh) potassium channels and/or channel subunits; (ii) modulation of Shaker (Sh) potassium channel activity (e.g., termination of prolonged membrane depolarization; (iii) modulation of high voltage activating channel activity and/or inactivating channel activity, and the like.

[2746] The nucleotide sequence of the isolated human 54414 cDNA and the predicted amino acid sequence encoded by the 54414 cDNA are shown in FIGS. 55A-55H and in SEQ ID NOs:52 and 53, respectively. A plasmid containing the human 54414 cDNA was deposited with the American Type Culture Collection (ATCC), 10801 University Boulevard, Manassas, Va. 20110-2209, on ______ and assigned Accession Number ______. This deposit will be maintained under the terms of the Budapest Treaty on the International Recognition of the Deposit of Microorganisms for the Purposes of Patent Procedure. This deposit were made merely as a convenience for those of skill in the art and is not an admission that a deposit is required under 35 U.S.C. §112.

[2747] The human 54414 gene, which is approximately 4632 nucleotides in length, encodes a protein having a molecular weight of approximately 123 kD and which is approximately 1118 amino acid residues in length.

[2748] The nucleotide sequence of the isolated human 53763 cDNA and the predicted amino acid sequence encoded by the 53763 cDNA are shown in FIGS. 59A-59D and in SEQ ID NOs:55 and 56, respectively. A plasmid containing the human 53763 cDNA was deposited with the American Type Culture Collection (ATCC), 10801 University Boulevard, Manassas, Va. 20110-2209, on ______ and assigned Accession Number ______. This deposit will be maintained under the terms of the Budapest Treaty on the International Recognition of the Deposit of Microorganisms for the Purposes of Patent Procedure. This deposit were made merely as a convenience for those of skill in the art and is not an admission that a deposit is required under 35 U.S.C. §112.

[2749] The human 53763 gene, which is approximately 2847 nucleotides in length, encodes a protein having a molecular weight of approximately 70.2 kD and which is approximately 638 amino acid residues in length.

[2750] 67076, 67102, 44181, 67084FL, and 67084alt Molecules of the Invention

[2751] The 67076, 67102, 44181, 67084FL, and 67084alt polypeptides comprise at least one “transmembrane domain” and preferably eight, nine, or ten transmembrane domains. A MEMSAT analysis and a structural, hydrophobicity, and antigenicity analysis also resulted in the identification of ten transmembrane domains in the amino acid sequence of human 67076 (SEQ ID NO:59) at about residues 57-77, 84-105, 292-313, 345-365, 863-883, 905-926, 956-977, 989-1009, 1021-1041, and 1060-1087. A MEMSAT analysis and a structural, hydrophobicity, and antigenicity analysis resulted in the identification of ten transmembrane domains in the amino acid sequence of human 67102 (SEQ ID NO:62) at about residues 98-115, 122-140, 322-344, 366-390, 582-601, 752-770, 1145-1166, 1225-1246, 1253-1276, and 1298-1317. A MEMSAT analysis and a structural, hydrophobicity, and antigenicity analysis resulted in the identification of ten transmembrane domains in the amino acid sequence of human 44181 (SEQ ID NO:65) at about residues 56-72, 87-103, 290-311, 343-363, 878-898, 911-931, 961-982, 995-1015, 1027-1047, and 1062-1086. A MEMSAT analysis and a structural, hydrophobicity, and antigenicity analysis resulted in the identification of ten transmembrane domains in the amino acid sequence of human 67084FL (SEQ ID NO:68) at about residues 104-120, 124-144, 331-350, 357-374, 887-903, 912-931, 961-983, 990-1008, 1015-1035, and 1043-1067. A MEMSAT analysis and a structural, hydrophobicity, and antigenicity analysis resulted in the identification of ten transmembrane domains in the amino acid sequence of human 67084alt (SEQ ID NO:71) at about residues 104-120, 124-144, 331-350, 357-379, 887-903, 912-931, 961-983, 990-1008, 1015-1035, and 1054-1078.

[2752] The family of 67076, 67102, 44181, 67084FL, or 67084alt proteins of the present invention also comprises at least one “extramembrane domain” in the protein or corresponding nucleic acid molecule. As used herein, an “extramembrane domain” includes a domain having greater than 20 amino acid residues that is found between transmembrane domains, preferably on the cytoplasmic side of the plasma membrane, and does not span or traverse the plasma membrane. An extramembrane domain preferably includes at least one, two, three, four or more motifs or consensus sequences characteristic of P-type ATPases, i.e., includes one, two, three, four, or more “P-type ATPase consensus sequences or motifs”. As used herein, the phrase “P-type ATPase consensus sequences or motifs” includes any consensus sequence or motif known in the art to be characteristic of P-type ATPases, including, but not limited to, the P-type ATPase sequence 1 motif (as defined herein), the P-type ATPase sequence 2 motif (as defined herein), the P-type ATPase sequence 3 motif (as defined herein), and the E1-E2 ATPases phosphorylation site (as defined herein).

[2753] In one embodiment, the family of 67076, 67102, 44181, 67084FL, or 67084alt proteins of the present invention comprises at least one “N-terminal” large extramembrane domain in the protein or corresponding nucleic acid molecule. As used herein, an “N-terminal” large extramembrane domain is found in the N-terminal ⅓^{rd} of the protein, preferably between the second and third transmembrane domains of a 67076, 67102, 44181, 67084FL, or 67084alt protein and includes about 60-300, 80-280, 100-260, 120-240, 140-220, 160-200, or preferably, 180, 185, or 186 amino acid residues. In a preferred embodiment, an N-terminal large extramembrane domain includes at least one P-type ATPase sequence 1 motif (as described herein). An N-terminal large extramembrane domain was identified in the amino acid sequence of human 67076 at about residues 106-291 of SEQ ID NO:59. An N-terminal large extramembrane domain was identified in the amino acid sequence of human 67102 at about residues 141-321 of SEQ ID NO:62. An N-terminal large extramembrane domain was identified in the amino acid sequence of human 44181 at about residues 104-289 of SEQ ID NO:65. An N-terminal large extramembrane domain was identified in the amino acid sequence of human 67084FL at about residues 145-330 of SEQ ID NO:68. An N-terminal large extramembrane domain was identified in the amino acid sequence of human 67087alt at about residues 145-330 of SEQ ID NO:71.

[2754] The family of 67076, 67102, 44181, 67084FL, or 67084alt proteins of the present invention also comprises at least one “C-terminal” large extramembrane domain in the protein or corresponding nucleic acid molecule. As used herein, a “C-terminal” large extramembrane domain is found in the C-terminal ⅔^{rds} of the protein, preferably between the fourth and fifth transmembrane domains of a 67076, 67102, 44181, 67084FL, or 67084alt protein and includes about 150-1000, 300-900, 370-850, 400-820, 430-790, 460-760, 430-730, 460-700, 430-670, 460-640, 430-610, 490-580, 510-550, or preferably, 190, 506, or 523 amino acid residues. In a preferred embodiment, a C-terminal large extramembrane domain includes at least one or more of the following motifs: a P-type ATPase sequence 2 motif (as described herein), a P-type ATPase sequence 3 motif (as defined herein), and/or an E1-E2 ATPases phosphorylation site (as defined herein). A C-terminal large extramembrane domain was identified in the amino acid sequence of human 67076 at about residues 366-862 of SEQ ID NO:59. A C-terminal large extramembrane domain was identified in the amino acid sequence of human 67102 at about residues 391-581 of SEQ ID NO:62. A C-terminal large extramembrane domain was identified in the amino acid sequence of human 44181 at about residues 364-877 of SEQ ID NO:65. A C-terminal large extramembrane domain was identified in the amino acid sequence of human 67084FL at about residues 380-886 of SEQ ID NO:68. A C-terminal large extramembrane domain was identified in the amino acid sequence of human 67084alt at about residues 380-886 of SEQ ID NO:71.

[2755] In another embodiment, a 67076, 67102, 44181, 67084FL, or 67084alt protein or 67076, 67102, 44181, 67084FL, or 67084alt extramembrane domain is characterized by at least one “P-type ATPase sequence 1 motif” in the protein or corresponding nucleic acid sequence. As used herein, a “P-type ATPase sequence 1 motif” is a conserved sequence motif diagnostic for P-type ATPases (Tang, X. et al. (1996) Science 272:1495-1497; Fagan, M. J. and Saier, M. H. (1994) J. Mol. Evol. 38:57). Amino acid residues of the P-type ATPase sequence 1 motif are involved in the coupling of ATP hydrolysis with transport (e.g., transport of phospholipids). The consensus sequence for a P-type ATPase sequence 1 motif is [DNS]-[QENR]-[SA]-[LIVSAN]-[LIV]-[TSN]-G-E-[SN] (SEQ ID NO:82). The use of amino acids in brackets indicates that the amino acid at the indicated position may be any one of the amino acids within the brackets, e.g., [SA] indicates any of one of either S (serine) or A (alanine). In a preferred embodiment, a P-type ATPase sequence 1 motif is contained within an N-terminal large extramembrane domain. In another preferred embodiment, a P-type ATPase sequence 1 motif in the 67076, 67102, 44181, 67084FL, or 67084alt proteins of the present invention has at least 1, 2, 3, or preferably 4 amino acid resides which match the consensus sequence for a P-type ATPase sequence 1 motif. A P-type ATPase sequence 1 motif was identified in the amino acid sequence of human 67076 at about residues 173-181 of SEQ ID NO:59. A P-type ATPase sequence 1 motif was identified in the amino acid sequence of human 67102 at about residues 208-216 of SEQ ID NO:62. A P-type ATPase sequence 1 motif was identified in the amino acid sequence of human 44181 at about residues 173-181 of SEQ ID NO:65. A P-type ATPase sequence 1 motif was identified in the amino acid sequence of human 67084FL at about residues 213-221 of SEQ ID NO:68. A P-type ATPase sequence 1 motif was identified in the amino acid sequence of human 67084alt at about residues 213-221 of SEQ ID NO:71.

[2756] In another embodiment, a 67076, 67102, 44181, 67084FL, or 67084alt protein or 67076, 67102, 44181, 67084FL, or 67084alt extramembrane domain is characterized by at least one “P-type ATPase sequence 2 motif” in the protein or corresponding nucleic acid sequence. As used herein, a “P-type ATPase sequence 2 motif” is a conserved sequence motif diagnostic for P-type ATPases (Tang, X. et al. (1996) Science 272:1495-1497; Fagan, M. J. and Saier, M. H. (1994) J. Mol. Evol. 38:57). Preferably, a P-type ATPase sequence 2 motif overlaps with and/or includes an E1-E2 ATPases phosphorylation site (as defined herein). The consensus sequence for a P-type ATPase sequence 2 motif is [LIV]-[CAML]-[STFL]-D-K-T-G-T-[LI]-T (SEQ ID NO:83). The use of amino acids in brackets indicates that the amino acid at the indicated position may be any one of the amino acids within the brackets, e.g., [LI] indicates any of one of either L (leucine) or I (isoleucine). In a preferred embodiment, a P-type ATPase sequence 2 motif is contained within a C-terminal large extramembrane domain. In another preferred embodiment, a P-type ATPase sequence 2 motif in the 67076, 67102, 44181, 67084FL, or 67084alt proteins of the present invention has at least 1, 2, 3, 4, 5, 6, 7, 8, or more preferably 9 amino acid resides which match the consensus sequence for a P-type ATPase sequence 2 motif. A P-type ATPase sequence 2 motif was identified in the amino acid sequence of human 67076 at about residues 406-415 of SEQ ID NO:59. A P-type ATPase sequence 2 motif was identified in the amino acid sequence of human 67102 at about residues 435-444 of SEQ ID NO:62. A P-type ATPase sequence 2 motif was identified in the amino acid sequence of human 44181 at about residues 404-413 of SEQ ID NO:65. A P-type ATPase sequence 2 motif was identified in the amino acid sequence of human 67084FL at about residues 413-422 of SEQ ID NO:68. A P-type ATPase sequence 2 motif was identified in the amino acid sequence of human 67084alt at about residues 413-422 of SEQ ID NO:71.

[2757] In yet another embodiment, a 67076, 67102, 44181, 67084FL, or 67084alt protein or 67076, 67102, 44181, 67084FL, or 67084alt extramembrane domain is characterized by at least one “P-type ATPase sequence 3 motif” in the protein or corresponding nucleic acid sequence. As used herein, a “P-type ATPase sequence 3 motif” is a conserved sequence motif diagnostic for P-type ATPases (Tang, X. et al. (1996) Science 272:1495-1497; Fagan, M. J. and Saier, M. H. (1994) J. Mol. Evol. 38:57). Amino acid residues of the P-type ATPase sequence 3 motif are involved in ATP binding. The consensus sequence for a P-type ATPase sequence 3 motif is [TIV]-G-D-G-X-N-D-[ASG]-P-[ASV]-L (SEQ ID NO:84). X indicates that the amino acid at the indicated position may be any amino acid (i.e., is not conserved). The use of amino acids in brackets indicates that the amino acid at the indicated position may be any one of the amino acids within the brackets, e.g., [TIV] indicates any of one of either T (threonine), I (isoleucine), or V (valine). In a preferred embodiment, a P-type ATPase sequence 3 motif is contained within a C-terminal large extramembrane domain. In another preferred embodiment, a P-type ATPase sequence 3 motif in the 67076, 67102, 44181, 67084FL, or 67084alt proteins of the present invention has at least 1, 2, 3, 4, 5, 6, or more preferably 7 amino acid resides (including the amino acid at the position indicated by “X”) which match the consensus sequence for a P-type ATPase sequence 3 motif. A P-type ATPase sequence 3 motif was identified in the amino acid sequence of human 67076 at about residues 813-824 of SEQ ID NO:59. A P-type ATPase sequence 3 motif was identified in the amino acid sequence of human 67102 at about residues 1054-1064 of SEQ ID NO:62. A P-type ATPase sequence 3 motif was identified in the amino acid sequence of human 44181 at about residues 819-829 of SEQ ID NO:65. A P-type ATPase sequence 3 motif was identified in the amino acid sequence of human 67084FL at about residues 820-830 of SEQ ID NO:68. A P-type ATPase sequence 3 motif was identified in the amino acid sequence of human 67084alt at about residues 820-830 of SEQ ID NO:71.

[2758] In another embodiment, a 67076, 67102, 44181, 67084FL, or 67084alt protein of the present invention is identified based on the presence of an “E1-E2 ATPases phosphorylation site” (alternatively referred to simply as a “phosphorylation site”) in the protein or corresponding nucleic acid molecule. An E1-E2 ATPases phosphorylation site functions in accepting a phosphate moiety and has the amino acid sequence DKTGT (amino acid residues 4-8 of SEQ ID NO:83), and can be included within the E1-E2 ATPase phosphorylation site consensus sequence: D-K-T-G-T-[LIVM]-[TI] (SEQ ID NO:85), wherein D is phosphorylated. The use of amino acids in brackets indicates that the amino acid at the indicated position may be any one of the amino acids within the brackets, e.g., [TI] indicates any of one of either T (threonine) or I (isoleucine). The E1-E2 ATPases phosphorylation site consensus sequence has been assigned ProSite Accession Number PS00154. To identify the presence of an E1-E2 ATPases phosphorylation site consensus sequence in a 67076, 67102, 44181, 67084FL, or 67084alt protein, and to make the determination that a protein of interest has a particular profile, the amino acid sequence of the protein may be searched against a database of known protein motifs (e.g., the ProSite database) using the default parameters (available at the Prosite website). A search was performed against the ProSite database resulting in the identification of an E1-E2 ATPases phosphorylation site consensus sequence in the amino acid sequence of human 67076 (SEQ ID NO:59) at about residues 409-415. A search was performed against the ProSite database resulting in the identification of an E1-E2 ATPases phosphorylation site consensus sequence in the amino acid sequence of human 67102 (SEQ ID NO:62) at about residues 438-444. A search was performed against the ProSite database resulting in the identification of an E1-E2 ATPases phosphorylation site consensus sequence in the amino acid sequence of human 44181 (SEQ ID NO:65) at about residues 407-413. A search was performed against the ProSite database resulting in the identification of an E1-E2 ATPases phosphorylation site consensus sequence in the amino acid sequence of human 67084FL (SEQ ID NO:68) at about residues 416-422. A search was performed against the ProSite database resulting in the identification of an E1-E2 ATPases phosphorylation site consensus sequence in the amino acid sequence of human 67084alt (SEQ ID NO:71) at about residues 416-422.

[2759] Preferably an E1-E2 ATPases phosphorylation site has a “phosphorylation site activity,” for example, the ability to be phosphorylated; to be dephosphorylated; to regulate the E1-E2 conformational change of the phospholipid transporter in which it is contained; to regulate transport of phospholipids (e.g., aminophospholipids such as phosphatidylserine and phosphatidylethanolamine, choline phospholipids such as phosphatidylcholine and sphingomyelin, and bile acids) across a cellular membrane by the 67076, 67102, 44181, 67084FL, or 67084alt protein in which it is contained; and/or to regulate the activity (as defined herein) of the 67076, 67102, 44181, 67084FL, or 67084alt protein in which it is contained. Accordingly, identifying the presence of an “E1-E2 ATPases phosphorylation site” can include isolating a fragment of a 67076, 67102, 44181, 67084FL, or 67084alt molecule (e.g., a 67076, 67102, 44181, 67084FL, or 67084alt polypeptide) and assaying for the ability of the fragment to exhibit one of the aforementioned phosphorylation site activities.

[2760] In another embodiment, a 67076, 67102, 44181, 67084FL, or 67084alt protein of the present invention may also be identified based on its ability to adopt an E1 conformation or an E2 conformation. As used herein, an “E1 conformation” of a 67076, 67102, 44181, 67084FL, or 67084alt protein includes a 3-dimensional conformation of a 67076, 67102, 44181, 67084FL, or 67084alt protein which does not exhibit 67076, 67102, 44181, 67084FL, or 67084alt activity (e.g., the ability to transport phospholipids), as defined herein. An E1 conformation of a 67076, 67102, 44181, 67084FL, or 67084alt protein usually occurs when the 67076, 67102, 44181, 67084FL, or 67084alt protein is unphosphorylated. As used herein, an “E2 conformation” of a 67076, 67102, 44181, 67084FL, or 67084alt protein includes a 3-dimensional conformation of a 67076, 67102, 44181, 67084FL, or 67084alt protein which exhibits 67076, 67102, 44181, 67084FL, or 67084alt activity (e.g., the ability to transport phospholipids), as defined herein. An E2 conformation of a 67076, 67102, 44181, 67084FL, or 67084alt protein usually occurs when the 67076, 67102, 44181, 67084FL, or 67084alt protein is phosphorylated.

[2761] In still another embodiment, a 67076, 67102, 44181, 67084FL, or 67084alt protein of the present invention is identified based on the presence of “phospholipid transporter specific” amino acid residues. As used herein, “phospholipid transporter specific” amino acid residues are amino acid residues specific to the class of phospholipid transporting P-type ATPases (as defined in Tang, X. et al. (1996) Science 272:1495-1497). Phospholipid transporter specific amino acid residues are not found in those P-type ATPases which transport molecules which are not phospholipids (e.g., cations). For example, phospholipid transporter specific amino acid residues are found at the first, second, and fifth positions of the P-type ATPase sequence 1 motif. In phospholipid transporting P-type ATPases, the first position of the P-type ATPase sequence 1 motif is preferably E (glutamic acid), the second position is preferably T (threonine), and the fifth position is preferably L (leucine). A phospholipid transporter specific amino acid residue is further found at the second position of the P-type ATPase sequence 2 motif. In phospholipid transporting P-type ATPases, the second position of the P-type ATPase sequence 2 motif is preferably F (phenylalanine). Phospholipid transporter specific amino acid residues are still further found at the first, tenth, and eleventh positions of the P-type ATPase sequence 3 motif. In phospholipid transporting P-type ATPases, the first position of the P-type ATPase sequence 3 motif is preferably I (isoleucine), the tenth position is preferably M (methionine), and the eleventh position is preferably I (isoleucine).

[2762] Phospholipid transporter specific amino acid residues were identified in the amino acid sequence of human 67076 (SEQ ID NO:59) at about residues 174 and 177 (within the P-type ATPase sequence 1 motif), at about residue 407 (within the P-type ATPase sequence 2 motif), and at about residues 813, 823, and 824 (within the P-type ATPase sequence 3 motif).

[2763] Phospholipid transporter specific amino acid residues were identified in the amino acid sequence of human 67102 (SEQ ID NO:62) at about residues 208, 209, and 212 (within the P-type ATPase sequence 1 motif), at about residue 436 (within the P-type ATPase sequence 2 motif), and at about residues 1054, 1063, and 1064 (within the P-type ATPase sequence 3 motif).

[2764] Phospholipid transporter specific amino acid residues were identified in the amino acid sequence of human 44181 (SEQ ID NO:65) at about residues 174 and 177 (within the P-type ATPase sequence 1 motif), at about residue 405 (within the P-type ATPase sequence 2 motif), and at about residues 819, 828, and 829 (within the P-type ATPase sequence 3 motif).

[2765] Phospholipid transporter specific amino acid residues were identified in the amino acid sequence of human 67084FL (SEQ ID NO:68) at about residues 214 and 217 (within the P-type ATPase sequence 1 motif) and at about residues 820, 829, and 830 (within the P-type ATPase sequence 3 motif).

[2766] Phospholipid transporter specific amino acid residues were identified in the amino acid sequence of human 67084alt (SEQ ID NO:71) at about residues 214 and 217 (within the P-type ATPase sequence 1 motif), and at about residues 820, 829, and 830 (within the P-type ATPase sequence 3 motif).

[2767] Isolated polypeptides of the present invention, preferably 67076, 67102, 44181, 67084FL, or 67084alt polypeptides, have an amino acid sequence sufficiently identical to the amino acid sequence of SEQ ID NO:59, 62, 65, 68, or 71 or are encoded by a nucleotide sequence sufficiently identical to SEQ ID NO:58, 60, 61, 63, 64, 66, 67, 69, 70, or 72. For example, amino acid or nucleotide sequences which share common structural domains having at least 50%, 55%, 60%, 65%, 70%, 75%, 80%, 85%, 85%, 90%, 95%, 96%, 97%, 98%, 99% or more homology or identity across the amino acid sequences of the domains and contain at least one and preferably two structural domains or motifs, are defined herein as sufficiently identical. Furthermore, amino acid or nucleotide sequences which share at least 50%, 55%, 60%, 65%, 70%, 75%, 80%, 85%, 85%, 90%, 95%, 96%, 97%, 98%, 99% or more homology or identity and share a common functional activity are defined herein as sufficiently identical.

[2768] In a preferred embodiment, a 67076, 67102, 44181, 67084FL, or 67084alt protein includes at least one or more of the following domains, sites, or motifs: a transmembrane domain, an N-terminal large extramembrane domain, a C-terminal large extramembrane domain, an E1-E2 ATPases phosphorylation site, a P-type ATPase sequence 1 motif, a P-type ATPase sequence 2 motif, a P-type ATPase sequence 3 motif, and/or one or more phospholipid transporter specific amino acid resides, and has an amino acid sequence at least about 50%, 55%, 60%, 65%, 70%, 75%, 80%, 85%, 85%, 90%, 95%, 96%, 97%, 98%, 99% or more homologous or identical to the amino acid sequence of SEQ ID NO:59, 62, 65, 68, or 71, or the amino acid sequence encoded by the DNA insert of the plasmid deposited with ATCC as Accession Number ______, ______, ______, ______, or ______. In yet another preferred embodiment, a 67076, 67102, 44181, 67084FL, or 67084alt protein includes at least one or more of the following domains, sites, or motifs: a transmembrane domain, an N-terminal large extramembrane domain, a C-terminal large extramembrane domain, an E1-E2 ATPases phosphorylation site, a P-type ATPase sequence 1 motif, a P-type ATPase sequence 2 motif, a P-type ATPase sequence 3 motif, and/or one or more phospholipid transporter specific amino acid resides, and is encoded by a nucleic acid molecule having a nucleotide sequence which hybridizes under stringent hybridization conditions to a complement of a nucleic acid molecule comprising the nucleotide sequence of SEQ ID NO:58, 60, 61, 63, 64, 66, 67, 69, 70, or 72. In another preferred embodiment, a 67076, 67102, 44181, 67084FL, or 67084alt protein includes at least one or more of the following domains, sites, or motifs: a transmembrane domain, an N-terminal large extramembrane domain, a C-terminal large extramembrane domain, an E1-E2 ATPases phosphorylation site, a P-type ATPase sequence 1 motif, a P-type ATPase sequence 2 motif, a P-type ATPase sequence 3 motif, and/or one or more phospholipid transporter specific amino acid resides, and has a 67076, 67102, 44181, 67084FL, or 67084alt activity.

[2769] As used interchangeably herein, a “phospholipid transporter activity” or a “67076, 67102, 44181, 67084FL, or 67084alt activity” includes an activity exerted or mediated by a 67076, 67102, 44181, 67084FL, or 67084alt protein, polypeptide or nucleic acid molecule on a 67076, 67102, 44181, 67084FL, or 67084alt responsive cell or on a 67076, 67102, 44181, 67084FL, or 67084alt substrate, as determined in vivo or in vitro, according to standard techniques. In one embodiment, a phospholipid transporter activity is a direct activity, such as an association with a 67076, 67102, 44181, 67084FL, or 67084alt target molecule. As used herein, a “target molecule” or “binding partner” is a molecule with which a 67076, 67102, 44181, 67084FL, or 67084alt protein binds or interacts in nature, such that 67076, 67102, 44181, 67084FL, or 67084alt-mediated function is achieved. In an exemplary embodiment, a 67076, 67102, 44181, 67084FL, or 67084alt target molecule is a 67076, 67102, 44181, 67084FL, or 67084alt substrate (e.g., a phospholipid, ATP, or a non-67076, 67102, 44181, 67084FL, or 67084alt protein). A phospholipid transporter activity can also be an indirect activity, such as a cellular signaling activity mediated by interaction of the 67076, 67102, 44181, 67084FL, or 67084alt protein with a 67076, 67102, 44181, 67084FL, or 67084alt substrate.

[2770] In a preferred embodiment, a phospholipid transporter activity is at least one of the following activities: (i) interaction with a 67076, 67102, 44181, 67084FL, or 67084alt substrate or target molecule (e.g., a phospholipid, ATP, or a non-67076, 67102, 44181, 67084FL, or 67084alt protein); (ii) transport of a 67076, 67102, 44181, 67084FL, or 67084alt substrate or target molecule (e.g., an aminophospholipid such as phosphatidylserine or phosphatidylethanolamine) from one side of a cellular membrane to the other; (iii) the ability to be phosphorylated or dephosphorylated; (iv) adoption of an E1 conformation or an E2 conformation; (v) conversion of a 67076, 67102, 44181, 67084FL, or 67084alt substrate or target molecule to a product (e.g., hydrolysis of ATP); (vi) interaction with a second non-67076, 67102, 44181, 67084FL, or 67084alt protein; (vii) modulation of substrate or target molecule location (e.g., modulation of phospholipid location within a cell and/or location with respect to a cellular membrane); (viii) maintenance of aminophospholipid gradients; (ix) modulation of intra- or intercellular signaling and/or gene transcription (e.g., either directly or indirectly); and/or (x) modulation of cellular proliferation, growth, differentiation, apoptosis, absorption, or secretion.

[2771] The nucleotide sequence of the isolated human 67076, 67102, 44181, 67084FL, or 67084alt cDNA and the predicted amino acid sequence of the human 67076, 67102, 44181, 67084FL, or 67084alt polypeptides are shown in FIGS. 63A-63H, 67A-67I, 71A-71J, 75A-75G, and 79A-79G, and in SEQ ID NOs:58 and 59, SEQ ID NOs:61 and 62, SEQ ID NOs:64 and 65, SEQ ID NOs:67 and 68, and SEQ ID NOs:70 and 71, respectively. Plasmids containing the nucleotide sequence encoding human 67076, human 67102, human 44181, human 67084FL, and/or human 67084alt were deposited with the American Type Culture Collection (ATCC), 10801 University Boulevard, Manassas, Va. 20110-2209, on ______, ______, ______, ______, and ______, respectively, and assigned Accession Numbers ______, ______, ______, ______, and ______, respectively. These deposits will be maintained under the terms of the Budapest Treaty on the International Recognition of the Deposit of Microorganisms for the Purposes of Patent Procedure. These deposit were made merely as a convenience for those of skill in the art and are not admissions that a deposit is required under 35 U.S.C. §112.

[2772] The human 67076 gene, which is approximately 6582 nucleotides in length, encodes a polypeptide which is approximately 1129 amino acid residues in length. The human 67102 gene, which is approximately 6074 nucleotides in length, encodes a polypeptide which is approximately 1426 amino acid residues in length. The human 44181 gene, which is approximately 7221 nucleotides in length, encodes a polypeptide which is approximately 1177 amino acid residues in length. The human 67084FL gene, which is approximately 4198 nucleotides in length, encodes a polypeptide which is approximately 1084 amino acid residues in length. The human 67084alt gene, which is approximately 4231 nucleotides in length, encodes a polypeptide which is approximately 1095 amino acid residues in length.

[2773] Various aspects of the invention are described in further detail in the following subsections:

[2774] I. Isolated Nucleic Acid Molecules

[2775] One aspect of the invention pertains to isolated nucleic acid molecules that encode 8099, 46455, 54414, 53763, 67076, 67102, 44181, 67084FL, or 67084alt polypeptides or biologically active portions thereof, as well as nucleic acid fragments sufficient for use as hybridization probes to identify 8099, 46455, 54414, 53763, 67076, 67102, 44181, 67084FL, or 67084alt-encoding nucleic acid molecules (e.g., 8099, 46455, 54414, 53763, 67076, 67102, 44181, 67084FL, or 67084alt mRNA) and fragments for use as PCR primers for the amplification or mutation of 8099, 46455, 54414, 53763, 67076, 67102, 44181, 67084FL, or 67084alt nucleic acid molecules. As used herein, the term “nucleic acid molecule” is intended to include DNA molecules (e.g., cDNA or genomic DNA) and RNA molecules (e.g., mRNA) and analogs of the DNA or RNA generated using nucleotide analogs. The nucleic acid molecule can be single-stranded or double-stranded, but preferably is double-stranded DNA.

[2776] The term “isolated nucleic acid molecule” includes nucleic acid molecules which are separated from other nucleic acid molecules which are present in the natural source of the nucleic acid. For example, with regards to genomic DNA, the term “isolated” includes nucleic acid molecules which are separated from the chromosome with which the genomic DNA is naturally associated. Preferably, an “isolated” nucleic acid is free of sequences which naturally flank the nucleic acid (i.e., sequences located at the 5′ and 3′ ends of the nucleic acid) in the genomic DNA of the organism from which the nucleic acid is derived. For example, in various embodiments, the isolated 8099, 46455, 54414, 53763, 67076, 67102, 44181, 67084FL, or 67084alt nucleic acid molecule can contain less than about 5 kb, 4 kb, 3 kb, 2 kb, 1 kb, 0.5 kb or 0.1 kb of nucleotide sequences which naturally flank the nucleic acid molecule in genomic DNA of the cell from which the nucleic acid is derived. Moreover, an “isolated” nucleic acid molecule, such as a cDNA molecule, can be substantially free of other cellular material, or culture medium when produced by recombinant techniques, or substantially free of chemical precursors or other chemicals when chemically synthesized.

[2777] A nucleic acid molecule of the present invention, e.g., a nucleic acid molecule having the nucleotide sequence of SEQ ID NO:46, 48, 49, 51, 52, 54, 55, 57, 58, 60, 61, 63, 64, 66, 67, 69, 70, or 72, or the nucleotide sequence of the DNA insert of the plasmid deposited with ATCC as Accession Number ______, ______, ______, ______, or ______ or a portion thereof, can be isolated using standard molecular biology techniques and the sequence information provided herein. Using all or a portion of the nucleic acid sequence of SEQ ID NO:46, 48, 49, 51, 52, 54, 55, 57, 58, 60, 61, 63, 64, 66, 67, 69, 70, or 72, or the nucleotide sequence of the DNA insert of the plasmid deposited with ATCC as Accession Number ______, ______, ______, ______, or ______, as a hybridization probe, 8099, 46455, 54414, 53763, 67076, 67102, 44181, 67084FL, or 67084alt nucleic acid molecules can be isolated using standard hybridization and cloning techniques (e.g., as described in Sambrook, J., Fritsh, E. F., and Maniatis, T. Molecular Cloning: A Laboratory Manual. 2nd, ed, Cold Spring Harbor Laboratory, Cold Spring Harbor Laboratory Press, Cold Spring Harbor, N.Y., 1989).

[2778] Moreover, a nucleic acid molecule encompassing all or a portion of SEQ ID NO:46, 48, 49, 51, 52, 54, 55, 57, 58, 60, 61, 63, 64, 66, 67, 69, 70, or 72, or the nucleotide sequence of the DNA insert of the plasmid deposited with ATCC as Accession Number ______, ______, ______, ______, or ______ can be isolated by the polymerase chain reaction (PCR) using synthetic oligonucleotide primers designed based upon the sequence of SEQ ID NO:46, 48, 49, 51, 52, 54, 55, 57, 58, 60, 61, 63, 64, 66, 67, 69, 70, or 72, or the nucleotide sequence of the DNA insert of the plasmid deposited with ATCC as Accession Number ______, ______, ______, ______, or ______.

[2779] A nucleic acid of the invention can be amplified using cDNA, mRNA or alternatively, genomic DNA, as a template and appropriate oligonucleotide primers according to standard PCR amplification techniques. The nucleic acid so amplified can be cloned into an appropriate vector and characterized by DNA sequence analysis. Furthermore, oligonucleotides corresponding to 8099, 46455, 54414, 53763, 67076, 67102, 44181, 67084FL, or 67084alt nucleotide sequences can be prepared by standard synthetic techniques, e.g., using an automated DNA synthesizer.

[2780] In one embodiment, an isolated nucleic acid molecule of the invention comprises the nucleotide sequence shown in SEQ ID NO:46. The sequence of SEQ ID NO:46 corresponds to the human 8099 cDNA. This cDNA comprises sequences encoding the human 8099 polypeptide (i.e., “the coding region”, from nucleotides 180-2034) as well as 5′ untranslated sequences (nucleotides 1-179) and 3′ untranslated sequences (nucleotides 2035-2725). Alternatively, the nucleic acid molecule can comprise only the coding region of SEQ ID NO:46 (e.g., nucleotides 180-2034, corresponding to SEQ ID NO:48). Accordingly, in another embodiment, the isolated nucleic acid molecule comprises SEQ ID NO:48 and nucleotides 1-179 and 2035-2725 of SEQ ID NO:46. In yet another embodiment, the nucleic acid molecule consists of the nucleotide sequence set forth as SEQ ID NO:46 or 48.

[2781] In another embodiment, an isolated nucleic acid molecule of the invention comprises the nucleotide sequence shown in SEQ ID NO:49. The sequence of SEQ ID NO:49 corresponds to the human 46455 cDNA. This cDNA comprises sequences encoding the human 46455 polypeptide (i.e., “the coding region”, from nucleotides 376-1963) as well as 5′ untranslated sequences (nucleotides 1-375) and 3′ untranslated sequences (nucleotides 1964-2230). Alternatively, the nucleic acid molecule can comprise only the coding region of SEQ ID NO:49 (e.g., nucleotides 376-1963, corresponding to SEQ ID NO:51). Accordingly, in another embodiment, the isolated nucleic acid molecule comprises SEQ ID NO:51 and nucleotides 1-375 and 1964-2230 of SEQ ID NO:49 In yet another embodiment, the nucleic acid molecule consists of the nucleotide sequence set forth as SEQ ID NO:49 or SEQ ID NO:651.

[2782] In another embodiment, an isolated nucleic acid molecule of the invention comprises the nucleotide sequence shown in SEQ ID NO:52. This cDNA may comprise sequences encoding the human 54414 protein (e.g., the “coding region”, from nucleotides 225-3578), as well as 5′ untranslated sequence (nucleotides 1-224) and 3′ untranslated sequences (nucleotides 3579-4632) of SEQ ID NO:52. Alternatively, the nucleic acid molecule can comprise only the coding region of SEQ ID NO:52 (e.g., nucleotides 225-3578, corresponding to SEQ ID NO:54). Accordingly, in another embodiment, an isolated nucleic acid molecule of the invention comprises SEQ ID NO:54 and nucleotides 1-224 of SEQ ID NO:53. In yet another embodiment, the isolated nucleic acid molecule comprises SEQ ID NO:54 and nucleotides 3579-4632 of SEQ ID NO:52. In yet another embodiment, the nucleic acid molecule consists of the nucleotide sequence set forth as SEQ ID NO:52 or SEQ ID NO:54.

[2783] In still another embodiment, the cDNA may comprise sequences encoding the human 53763 protein (e.g., the “coding region”, from nucleotides 561-2474), as well as 5′ untranslated sequence (nucleotides 1-560) and 3′ untranslated sequences (nucleotides 2475-2847) of SEQ ID NO:55. Alternatively, the nucleic acid molecule can comprise only the coding region of SEQ ID NO:55 (e.g., nucleotides 561-2474, corresponding to SEQ ID NO:51). Accordingly, in another embodiment, an isolated nucleic acid molecule of the invention comprises SEQ ID NO:57 and nucleotides 1-560 of SEQ ID NO:55. In yet another embodiment, the isolated nucleic acid molecule comprises SEQ ID NO:57 and nucleotides 2475-2847 of SEQ ID NO:55. In yet another embodiment, the nucleic acid molecule consists of the nucleotide sequence set forth as SEQ ID NO:55 or SEQ ID NO:57.

[2784] In yet another embodiment, an isolated nucleic acid molecule of the invention comprises the nucleotide sequence shown in SEQ ID NO:58. The sequence of SEQ ID NO:58 corresponds to the human 67076 cDNA. This cDNA comprises sequences encoding the human 67076 polypeptide (i.e., “the coding region”, from nucleotides 524-3910) as well as 5′ untranslated sequences (nucleotides 1-523) and 3′ untranslated sequences (nucleotides 3911-6582). Alternatively, the nucleic acid molecule can comprise only the coding region of SEQ ID NO:58 (e.g., nucleotides 524-3910, corresponding to SEQ ID NO:60). Accordingly, in another embodiment, the isolated nucleic acid molecule comprises SEQ ID NO:60 and nucleotides 1-523 or 3911-6582 of SEQ ID NO:58. In yet another embodiment, the nucleic acid molecule consists of the nucleotide sequence set forth as SEQ ID NO:58 or SEQ ID NO:60.

[2785] In another embodiment, an isolated nucleic acid molecule of the invention comprises the nucleotide sequence shown in SEQ ID NO:61. The sequence of SEQ ID NO:61 corresponds to the human 67102 cDNA. This cDNA comprises sequences encoding the human 67102 polypeptide (i.e., “the coding region”, from nucleotides 274-4551) as well as 5′ untranslated sequences (nucleotides 1-273) and 3′ untranslated sequences (nucleotides 4552-6074). Alternatively, the nucleic acid molecule can comprise only the coding region of SEQ ID NO:61 (e.g., nucleotides 274-4551, corresponding to SEQ ID NO:63). Accordingly, in another embodiment, the isolated nucleic acid molecule comprises SEQ ID NO:63 and nucleotides 1-273 or 4552-6074 of SEQ ID NO:61. In yet another embodiment, the nucleic acid molecule consists of the nucleotide sequence set forth as SEQ ID NO:61 or SEQ ID NO:63.

[2786] In still another embodiment, an isolated nucleic acid molecule of the invention comprises the nucleotide sequence shown in SEQ ID NO:64. The sequence of SEQ ID NO:64 corresponds to the human 44181 cDNA. This cDNA comprises sequences encoding the human 44181 polypeptide (i.e., “the coding region”, from nucleotides 167-3697) as well as 5′ untranslated sequences (nucleotides 1-166) and 3′ untranslated sequences (nucleotides 3698-7221). Alternatively, the nucleic acid molecule can comprise only the coding region of SEQ ID NO:65 (e.g., nucleotides 167-3697, corresponding to SEQ ID NO:66). Accordingly, in another embodiment, the isolated nucleic acid molecule comprises SEQ ID NO:66 and nucleotides 1-166 or 3698-7221 of SEQ ID NO:64. In yet another embodiment, the nucleic acid molecule consists of the nucleotide sequence set forth as SEQ ID NO:64 or SEQ ID NO:66.

[2787] In yet another embodiment, an isolated nucleic acid molecule of the invention comprises the nucleotide sequence shown in SEQ ID NO:67. The sequence of SEQ ID NO:67 corresponds to the human 67084FL cDNA. This cDNA comprises sequences encoding the human 67084FL polypeptide (i.e., “the coding region”, from nucleotides 156-3407) as well as 5′ untranslated sequences (nucleotides 1-155) and 3′ untranslated sequences (nucleotides 3408-4198). Alternatively, the nucleic acid molecule can comprise only the coding region of SEQ ID NO:67 (e.g., nucleotides 156-3407, corresponding to SEQ ID NO:69). Accordingly, in another embodiment, the isolated nucleic acid molecule comprises SEQ ID NO:69 and nucleotides 1-155 or 3408-4198 of SEQ ID NO:67. In yet another embodiment, the nucleic acid molecule consists of the nucleotide sequence set forth as SEQ ID NO:67 or SEQ ID NO:69.

[2788] In a further embodiment, an isolated nucleic acid molecule of the invention comprises the nucleotide sequence shown in SEQ ID NO:70. The sequence of SEQ ID NO:70 corresponds to the human 67084alt cDNA. This cDNA comprises sequences encoding the human 67084alt polypeptide (i.e., “the coding region”, from nucleotides 156-3440) as well as 5′ untranslated sequences (nucleotides 1-155) and 3′ untranslated sequences (nucleotides 3441-4231). Alternatively, the nucleic acid molecule can comprise only the coding region of SEQ ID NO:70 (e.g., nucleotides 156-3440, corresponding to SEQ ID NO:72). Accordingly, in another embodiment, the isolated nucleic acid molecule comprises SEQ ID NO:72 and nucleotides 1-155 or 3441-4231 of SEQ ID NO:70. In yet another embodiment, the nucleic acid molecule consists of the nucleotide sequence set forth as SEQ ID NO:70 or SEQ ID NO:72.

[2789] In still another embodiment, an isolated nucleic acid molecule of the invention comprises a nucleic acid molecule which is a complement of the nucleotide sequence shown in sequence of SEQ ID NO:46, 48, 49, 51, 52, 54, 55, 57, 58, 60, 61, 63, 64, 66, 67, 69, 70, or 72, or the nucleotide sequence of the DNA insert of the plasmid deposited with ATCC as Accession Number ______, ______, ______, ______, or ______, or a portion of any of these nucleotide sequences. A nucleic acid molecule which is complementary to the nucleotide sequence shown in SEQ ID NO:46, 48, 49, 51, 52, 54, 55, 57, 58, 60, 61, 63, 64, 66, 67, 69, 70, or 72, or the nucleotide sequence of the DNA insert of the plasmid deposited with ATCC as Accession Number ______, ______, ______, ______, or ______, is one which is sufficiently complementary to the nucleotide sequence shown in SEQ ID NO:46, 48, 49, 51, 52, 54, 55, 57, 58, 60, 61, 63, 64, 66, 67, 69, 70, or 72, or the nucleotide sequence of the DNA insert of the plasmid deposited with ATCC as Accession Number ______, ______, ______, ______, or ______, such that it can hybridize to the nucleotide sequence shown in SEQ ID NO:46, 48, 49, 51, 52, 54, 55, 57, 58, 60, 61, 63, 64, 66, 67, 69, 70, or 72, or the nucleotide sequence of the DNA insert of the plasmid deposited with ATCC as Accession Number ______, ______, ______, ______, or ______, thereby forming a stable duplex.

[2790] In still another preferred embodiment, an isolated nucleic acid molecule of the present invention comprises a nucleotide sequence which is at least about 50%, 55%, 60%, 65%, 70%, 75%, 80%, 85%, 90%, 95%, 96%, 97%, 98%, 99% or more identical to the nucleotide sequence shown in SEQ ID NO:46, 48, 49, 51, 52, 54, 55, 57, 58, 60, 61, 63, 64, 66, 67, 69, 70, or 72 (e.g., to the entire length of the nucleotide sequence), or to the nucleotide sequence (e.g., the entire length of the nucleotide sequence) of the DNA insert of the plasmid deposited with ATCC as Accession Number ______, ______, ______, ______, or ______, or a portion of any of these nucleotide sequences. In one embodiment, a nucleic acid molecule of the present invention comprises a nucleotide sequence which is at least (or no greater than) 50-100, 100-250, 250-500, 500-750, 750-1000, 1000-1250, 1250-1500, 1500-1750, 1750-2000, 2000-2250, 2250-2500, 2500-2750, 2750-3000, 3000-3250, 3250-3500, 3500-3750, 3750-4000, 4000-4250, 4250-4500, 4500-4750, 4750-5000, 5000-5250, 5250-5500, 5500-5750, 5750-6000, 6000-6250, 6250-6500, 6500-6750, 6750-7000, 7000-7250, 7250-7500 or more nucleotides in length and hybridizes under stringent hybridization conditions to a complement of a nucleic acid molecule of SEQ ID NO:46, 48, 49, 51, 52, 54, 55, 57, 58, 60, 61, 63, 64, 66, 67, 69, 70, or 72, or the nucleotide sequence of the DNA insert of the plasmid deposited with ATCC as Accession Number ______, ______, ______, ______, or ______.

[2791] Moreover, the nucleic acid molecule of the invention can comprise only a portion of the nucleic acid sequence of SEQ ID NO:46, 48, 49, 51, 52, 54, 55, 57, 58, 60, 61, 63, 64, 66, 67, 69, 70, or 72, or the nucleotide sequence of the DNA insert of the plasmid deposited with ATCC as Accession Number ______, ______, ______, ______, or ______, for example, a fragment which can be used as a probe or primer or a fragment encoding a portion of a 8099, 46455, 54414, 53763, 67076, 67102, 44181, 67084FL, or 67084alt polypeptide, e.g., a biologically active portion of a 8099, 46455, 54414, 53763, 67076, 67102, 44181, 67084FL, or 67084alt polypeptide. The nucleotide sequence determined from the cloning of the 8099, 46455, 54414, 53763, 67076, 67102, 44181, 67084FL, or 67084alt gene allows for the generation of probes and primers designed for use in identifying and/or cloning other 8099, 46455, 54414, 53763, 67076, 67102, 44181, 67084FL, or 67084alt family members, as well as 8099, 46455, 54414, 53763, 67076, 67102, 44181, 67084FL, or 67084alt homologues from other species. The probe/primer typically comprises substantially purified oligonucleotide. The probe/primer (e.g., oligonucleotide) typically comprises a region of nucleotide sequence that hybridizes under stringent conditions to at least about 12 or 15, preferably about 20 or 25, more preferably about 30, 35, 40, 45, 50, 55, 60, 65, 75, 80, 85, 90, 95, or 100 or more consecutive nucleotides of a sense sequence of SEQ ID NO:46, 48, 49, 51, 52, 54, 55, 57, 58, 60, 61, 63, 64, 66, 67, 69, 70, or 72, or the nucleotide sequence of the DNA insert of the plasmid deposited with ATCC as Accession Number ______, ______, ______, ______, or ______, of an anti-sense sequence of SEQ ID NO:46, 48, 49, 51, 52, 54, 55, 57, 58, 60, 61, 63, 64, 66, 67, 69, 70, or 72 or the nucleotide sequence of the DNA insert of the plasmid deposited with ATCC as Accession Number ______, ______, ______, ______, or ______, or of a naturally occurring allelic variant or mutant of SEQ ID NO:46, 48, 49, 51, 52, 54, 55, 57, 58, 60, 61, 63, 64, 66, 67, 69, 70, or 72, or the nucleotide sequence of the DNA insert of the plasmid deposited with ATCC as Accession Number ______, ______, ______, ______, or ______.

[2792] Exemplary probes or primers are at least 12, 15, 20, 25, 30, 35, 40, 45, 50, 55, 60, 65, 70, 75 or more nucleotides in length and/or comprise consecutive nucleotides of an isolated nucleic acid molecule described herein. Probes based on the 8099, 46455, 54414, 53763, 67076, 67102, 44181, 67084FL, or 67084alt nucleotide sequences can be used to detect (e.g., specifically detect) transcripts or genomic sequences encoding the same or homologous polypeptides. In preferred embodiments, the probe further comprises a label group attached thereto, e.g., the label group can be a radioisotope, a fluorescent compound, an enzyme, or an enzyme co-factor. In another embodiment a set of primers is provided, e.g., primers suitable for use in a PCR, which can be used to amplify a selected region of a 8099, 46455, 54414, 53763, 67076, 67102, 44181, 67084FL, or 67084alt sequence, e.g., a domain, region, site or other sequence described herein. The primers should be at least 5, 10, 20, 30, 40, 50, 60, 70, 80, 90, 100 or more nucleotides in length. Such probes can be used as a part of a diagnostic test kit for identifying cells or tissue which misexpress a 8099, 46455, 54414, 53763, 67076, 67102, 44181, 67084FL, or 67084alt polypeptide, such as by measuring a level of a 8099, 46455, 54414, 53763, 67076, 67102, 44181, 67084FL, or 67084alt-encoding nucleic acid in a sample of cells from a subject e.g., detecting 8099, 46455, 54414, 53763, 67076, 67102, 44181, 67084FL, or 67084alt mRNA levels or determining whether a genomic 8099, 46455, 54414, 53763, 67076, 67102, 44181, 67084FL, or 67084alt gene has been mutated or deleted.

[2793] A nucleic acid fragment encoding a “biologically active portion of a 8099, 46455, 54414, 53763, 67076, 67102, 44181, 67084FL, or 67084alt polypeptide” can be prepared by isolating a portion of the nucleotide sequence of SEQ ID NO:46, 48, 49, 51, 52, 54, 55, 57, 58, 60, 61, 63, 64, 66, 67, 69, 70, or 72, or the nucleotide sequence of the DNA insert of the plasmid deposited with ATCC as Accession Number ______, ______, ______, ______, or ______, which encodes a polypeptide having a 8099, 46455, 54414, 53763, 67076, 67102, 44181, 67084FL, or 67084alt biological activity (the biological activities of the 8099, 46455, 54414, 53763, 67076, 67102, 44181, 67084FL, or 67084alt polypeptides are described herein), expressing the encoded portion of the 8099, 46455, 54414, 53763, 67076, 67102, 44181, 67084FL, or 67084alt polypeptide (e.g., by recombinant expression in vitro) and assessing the activity of the encoded portion of the 8099, 46455, 54414, 53763, 67076, 67102, 44181, 67084FL, or 67084alt polypeptide. In an exemplary embodiment, the nucleic acid molecule is at least 50-100, 100-250, 250-500, 500-750, 750-1000, 1000-1250, 1250-1500, 1500-1750, 1750-2000, 2000-2250, 2250-2500, 2500-2750, 2750-3000, 3000-3250, 3250-3500, 3500-3750, 3750-4000, 4000-4250, 4250-4500, 4500-4750, 4750-5000, 5000-5250, 5250-5500, 5500-5750, 5750-6000, 6000-6250, 6250-6500, 6500-6750, 6750-7000, 7000-7250, 7250-7500 or more nucleotides in length and encodes a polypeptide having a 8099, 46455, 54414, 53763, 67076, 67102, 44181, 67084FL, or 67084alt activity (as described herein).

[2794] The invention further encompasses nucleic acid molecules that differ from the nucleotide sequence shown in SEQ ID NO:46, 48, 49, 51, 52, 54, 55, 57, 58, 60, 61, 63, 64, 66, 67, 69, 70, or 72, or the nucleotide sequence of the DNA insert of the plasmid deposited with ATCC as Accession Number ______, ______, ______, ______, or ______. Such differences can be due to due to degeneracy of the genetic code, thus resulting in a nucleic acid which encodes the same 8099, 46455, 54414, 53763, 67076, 67102, 44181, 67084FL, or 67084alt polypeptides as those encoded by the nucleotide sequence shown in SEQ ID NO:46, 48, 49, 51, 52, 54, 55, 57, 58, 60, 61, 63, 64, 66, 67, 69, 70, or 72, or the nucleotide sequence of the DNA insert of the plasmid deposited with ATCC as Accession Number ______, ______, ______, ______, or ______. In another embodiment, an isolated nucleic acid molecule of the invention has a nucleotide sequence encoding a polypeptide having an amino acid sequence which differs by at least 1, but no greater than 5, 10, 20, 50 or 100 amino acid residues from the amino acid sequence shown in SEQ ID NO:47, 50, 53, 56, 59, 62, 65, 68, or 71, or the amino acid sequence encoded by the DNA insert of the plasmid deposited with the ATCC as Accession Number ______, ______, ______, ______, or ______. In yet another embodiment, the nucleic acid molecule encodes the amino acid sequence of human 8099, 46455, 54414, 53763, 67076, 67102, 44181, 67084FL, or 67084alt. If an alignment is needed for this comparison, the sequences should be aligned for maximum homology.

[2795] Nucleic acid variants can be naturally occurring, such as allelic variants (same locus), homologues (different locus), and orthologues (different organism) or can be non naturally occurring. Non-naturally occurring variants can be made by mutagenesis techniques, including those applied to polynucleotides, cells, or organisms. The variants can contain nucleotide substitutions, deletions, inversions and insertions. Variation can occur in either or both the coding and non-coding regions. The variations can produce both conservative and non-conservative amino acid substitutions (as compared in the encoded product).

[2796] Allelic variants result, for example, from DNA sequence polymorphisms within a population (e.g., the human population) that lead to changes in the amino acid sequences of the 8099, 46455, 54414, 53763, 67076, 67102, 44181, 67084FL, or 67084alt polypeptides. Such genetic polymorphism in the 8099, 46455, 54414, 53763, 67076, 67102, 44181, 67084FL, or 67084alt genes may exist among individuals within a population due to natural allelic variation. As used herein, the terms “gene” and “recombinant gene” refer to nucleic acid molecules which include an open reading frame encoding a 8099, 46455, 54414, 53763, 67076, 67102, 44181, 67084FL, or 67084alt polypeptide, preferably a mammalian 8099, 46455, 54414, 53763, 67076, 67102, 44181, 67084FL, or 67084alt polypeptide, and can further include non-coding regulatory sequences, and introns.

[2797] Accordingly, in one embodiment, the invention features isolated nucleic acid molecules which encode a naturally occurring allelic variant of a polypeptide comprising the amino acid sequence of SEQ ID NO:47, 50, 53, 56, 59, 62, 65, 68, or 71, or an amino acid sequence encoded by the DNA insert of the plasmid deposited with ATCC as Accession Number ______, ______, ______, ______, or ______, wherein the nucleic acid molecule hybridizes to a complement of a nucleic acid molecule comprising SEQ ID NO:46, 48, 49, 51, 52, 54, 55, 57, 58, 60, 61, 63, 64, 66, 67, 69, 70, or 72, for example, under stringent hybridization conditions.

[2798] Allelic variants of human 8099, 46455, 54414, 53763, 67076, 67102, 44181, 67084FL, or 67084alt include both functional and non-functional 8099, 46455, 54414, 53763, 67076, 67102, 44181, 67084FL, or 67084alt polypeptides.

[2799] Functional allelic variants are naturally occurring amino acid sequence variants of the human 8099 or 46455 polypeptides that have an 8099 or 46455 activity, e.g., maintain the ability to bind an 8099 or 46455 ligand or substrate and/or modulate sugar transport, or sugar homeostasis.

[2800] Functional allelic variants are naturally occurring amino acid sequence variants of the human 54414 or 53763 polypeptides that maintain the ability to, e.g., bind or interact with a 54414 or 53763 target molecule and/or modulate membrane excitability.

[2801] Functional allelic variants are naturally occurring amino acid sequence variants of the human 67076, 67102, 44181, 67084FL, or 67084alt polypeptides that have a 67076, 67102, 44181, 67084FL, or 67084alt activity, e.g, bind or interact with a 67076, 67102, 44181, 67084FL, or 67084alt substrate or target molecule, transport a 67076, 67102, 44181, 67084FL, or 67084alt substrate or target molecule across a cellular membrane, hydrolyze ATP, be phosphorylated or dephosphorylated, adopt an E1 conformation or an E2 conformation, and/or modulate cellular signaling, growth, proliferation, differentiation, absorption, or secretion.

[2802] Functional allelic variants will typically contain only conservative substitution of one or more amino acids of SEQ ID NO:47, 50, 53, 56, 59, 62, 65, 68, or 71, or substitution, deletion or insertion of non-critical residues in non-critical regions of the polypeptide.

[2803] Non-functional allelic variants are naturally occurring amino acid sequence variants of the human 8099 or 46455 polypeptides that do not have a 8099 or 46455 activity, e.g., maintain the ability to bind an 8099 or 46455 ligand or substrate and/or modulate sugar transport, or sugar homeostasis.

[2804] Non-functional allelic variants are naturally occurring amino acid sequence variants of the human 54414 or 53763 polypeptides that do not maintain the ability to, e.g., bind or interact with a 54414 or 53763 target molecule and/or modulate membrane excitability.

[2805] Non-functional allelic variants are naturally occurring amino acid sequence variants of the human 67076, 67102, 44181, 67084FL, or 67084alt polypeptides that do not have a 67076, 67102, 44181, 67084FL, or 67084alt activity, e.g., that do not have the ability to, e.g., bind or interact with a 67076, 67102, 44181, 67084FL, or 67084alt substrate or target molecule, transport a 67076, 67102, 44181, 67084FL, or 67084alt substrate or target molecule across a cellular membrane, hydrolyze ATP, be phosphorylated or dephosphorylated, adopt an E1 conformation or an E2 conformation, and/or modulate cellular signaling, growth, proliferation, differentiation, absorption, or secretion.

[2806] Non-functional allelic variants will typically contain a non-conservative substitution, a deletion, or insertion or premature truncation of the amino acid sequence of SEQ ID NO:47, 50, 53, 56, 59, 62, 65, 68, or 71, or a substitution, insertion or deletion in critical residues or critical regions.

[2807] The present invention further provides non-human orthologues of the human 8099, 46455, 54414, 53763, 67076, 67102, 44181, 67084FL, or 67084alt polypeptides. Orthologues of human 8099 or 46455 polypeptides are polypeptides that are isolated from non-human organisms and possess the same 8099 and/or 46455 activity, e.g., ligand binding and/or modulation of sugar transport mechanisms, as the human 8099 and/or 46455 polypeptide. Orthologues of the human 54414 or 53763 polypeptides are polypeptides that are isolated from non-human organisms and possess the same 54414 or 53763 target molecule binding mechanisms and/or ability to modulate membrane excitability of the human 54414 or 53763 polypeptides. Orthologues of human 67076, 67102, 44181, 67084FL, or 67084alt polypeptides are polypeptides that are isolated from non-human organisms and possess the same 67076, 67102, 44181, 67084FL, or 67084alt substrate or target molecule binding mechanisms, phospholipid transporting activity, ATPase activity, and/or modulation of cellular signaling mechanisms of the human 67076, 67102, 44181, 67084FL, or 67084alt proteins as the human 67076, 67102, 44181, 67084FL, or 67084alt polypeptides.

[2808] Orthologues of the human 8099, 46455, 54414, 53763, 67076, 67102, 44181, 67084FL, or 67084alt polypeptides can readily be identified as comprising an amino acid sequence that is substantially identical to SEQ ID NO:47, 50, 53, 56, 59, 62, 65, 68, or 71.

[2809] Moreover, nucleic acid molecules encoding other 8099, 46455, 54414, 53763, 67076, 67102, 44181, 67084FL, or 67084alt family members and, thus, which have a nucleotide sequence which differs from the 8099, 46455, 54414, 53763, 67076, 67102, 44181, 67084FL, or 67084alt sequences of SEQ ID NO:46, 48, 49, 51, 52, 54, 55, 57, 58, 60, 61, 63, 64, 66, 67, 69, 70, or 72, or the nucleotide sequence of the DNA insert of the plasmid deposited with ATCC as Accession Number ______, ______, ______, ______, or ______ are intended to be within the scope of the invention. For example, another 8099, 46455, 54414, 53763, 67076, 67102, 44181, 67084FL, or 67084alt cDNA can be identified based on the nucleotide sequence of human 8099, 46455, 54414, 53763, 67076, 67102, 44181, 67084FL, or 67084alt. Moreover, nucleic acid molecules encoding 8099, 46455, 54414, 53763, 67076, 67102, 44181, 67084FL, or 67084alt polypeptides from different species, and which, thus, have a nucleotide sequence which differs from the 8099, 46455, 54414, 53763, 67076, 67102, 44181, 67084FL, or 67084alt sequences of SEQ ID NO:46, 48, 49, 51, 52, 54, 55, 57, 58, 60, 61, 63, 64, 66, 67, 69, 70, or 72, or the nucleotide sequence of the DNA insert of the plasmid deposited with ATCC as Accession Number ______, ______, ______, ______, or ______ are intended to be within the scope of the invention. For example, a mouse 8099, 46455, 54414, 53763, 67076, 67102, 44181, 67084FL, or 67084alt cDNA can be identified based on the nucleotide sequence of a human 8099, 46455, 54414, 53763, 67076, 67102, 44181, 67084FL, or 67084alt.

[2810] Nucleic acid molecules corresponding to natural allelic variants and homologues of the 8099, 46455, 54414, 53763, 67076, 67102, 44181, 67084FL, or 67084alt cDNAs of the invention can be isolated based on their homology to the 8099, 46455, 54414, 53763, 67076, 67102, 44181, 67084FL, or 67084alt nucleic acids disclosed herein using the cDNAs disclosed herein, or a portion thereof, as a hybridization probe according to standard hybridization techniques under stringent hybridization conditions. Nucleic acid molecules corresponding to natural allelic variants and homologues of the 8099, 46455, 54414, 53763, 67076, 67102, 44181, 67084FL, or 67084alt cDNAs of the invention can further be isolated by mapping to the same chromosome or locus as the 8099, 46455, 54414, 53763, 67076, 67102, 44181, 67084FL, or 67084alt gene.

[2811] Orthologues, homologues and allelic variants can be identified using methods known in the art (e.g., by hybridization to an isolated nucleic acid molecule of the present invention, for example, under stringent hybridization conditions). In one embodiment, an isolated nucleic acid molecule of the invention is at least 15, 20, 25, 30 or more nucleotides in length and hybridizes under stringent conditions to the nucleic acid molecule comprising the nucleotide sequence of SEQ ID NO:46, 48, 49, 51, 52, 54, 55, 57, 58, 60, 61, 63, 64, 66, 67, 69, 70, or 72, or the nucleotide sequence of the DNA insert of the plasmid deposited with ATCC as Accession Number ______, ______, ______, ______, or ______. In other embodiment, the nucleic acid is at least 50-100, 100-250, 250-500, 500-750, 750-1000, 1000-1250, 1250-1500, 1500-1750, 1750-2000, 2000-2250, 2250-2500, 2500-2750, 2750-3000, 3000-3250, 3250-3500, 3500-3750, 3750-4000, 4000-4250, 4250-4500, 4500-4750, 4750-5000, 5000-5250, 5250-5500, 5500-5750, 5750-6000, 6000-6250, 6250-6500, 6500-6750, 6750-7000, 7000-7250, 7250-7500 or more nucleotides in length.

[2812] As used herein, the term “hybridizes under stringent conditions” is intended to describe conditions for hybridization and washing under which nucleotide sequences that are significantly identical or homologous to each other remain hybridized to each other. Preferably, the conditions are such that sequences at least about 70%, more preferably at least about 80%, even more preferably at least about 85% or 90% identical to each other remain hybridized to each other. Such stringent conditions are known to those skilled in the art and can be found in Current Protocols in Molecular Biology, Ausubel et al., eds., John Wiley & Sons, Inc. (1995), sections 2, 4 and 6. Additional stringent conditions can be found in Molecular Cloning: A Laboratory Manual, Sambrook et al., Cold Spring Harbor Press, Cold Spring Harbor, N.Y. (1989), chapters 7, 9 and 11. A preferred, non-limiting example of stringent hybridization conditions includes hybridization in 4×sodium chloride/sodium citrate (SSC), at about 65-70° C. (or hybridization in 4×SSC plus 50% formamide at about 42-50° C.) followed by one or more washes in 1×SSC, at about 65-70° C. A preferred, non-limiting example of highly stringent hybridization conditions includes hybridization in 1×SSC, at about 65-70° C. (or hybridization in 1×SSC plus 50% formamide at about 42-50° C.) followed by one or more washes in 0.3×SSC, at about 65-70° C. A preferred, non-limiting example of reduced stringency hybridization conditions includes hybridization in 4×SSC, at about 50-60° C. (or alternatively hybridization in 6×SSC plus 50% formamide at about 40-45° C.) followed by one or more washes in 2×SSC, at about 50-60° C. Ranges intermediate to the above-recited values, e.g., at 65-70° C. or at 42-50° C. are also intended to be encompassed by the present invention. SSPE (1×SSPE is 0.15M NaCl, 10 mM NaH₂PO₄, and 1.25 mM EDTA, pH 7.4) can be substituted for SSC (1×SSC is 0.15M NaCl and 15 mM sodium citrate) in the hybridization and wash buffers; washes are performed for 15 minutes each after hybridization is complete. The hybridization temperature for hybrids anticipated to be less than 50 base pairs in length should be 5-10° C. less than the melting temperature (Tₘ) of the hybrid, where Tₘ is determined according to the following equations. For hybrids less than 18 base pairs in length, Tₘ(° C.)=2(# of A+T bases)+4(# of G+C bases). For hybrids between 18 and 49 base pairs in length, Tₘ(° C.)=81.5+16.6(log₁₀[Na⁺])+0.41(%G+C)−(600/N), where N is the number of bases in the hybrid, and [Na⁺] is the concentration of sodium ions in the hybridization buffer ([Na⁺] for 1×SSC=0.165 M). It will also be recognized by the skilled practitioner that additional reagents may be added to hybridization and/or wash buffers to decrease non-specific hybridization of nucleic acid molecules to membranes, for example, nitrocellulose or nylon membranes, including but not limited to blocking agents (e.g., BSA or salmon or herring sperm carrier DNA), detergents (e.g., SDS), chelating agents (e.g., EDTA), Ficoll, PVP and the like. When using nylon membranes, in particular, an additional preferred, non-limiting example of stringent hybridization conditions is hybridization in 0.25-0.5M NaH₂PO₄, 7% SDS at about 65° C., followed by one or more washes at 0.02M NaH₂PO₄, 1% SDS at 65° C., see e.g., Church and Gilbert (1984) Proc. Natl. Acad. Sci. USA 81:1991-1995, (or alternatively 0.2×SSC, 1% SDS).

[2813] Preferably, an isolated nucleic acid molecule of the invention that hybridizes under stringent conditions to the sequence of SEQ ID NO:46, 48, 49, 51, 52, 54, 55, 57, 58, 60, 61, 63, 64, 66, 67, 69, 70, or 72, and corresponds to a naturally-occurring nucleic acid molecule. As used herein, a “naturally-occurring” nucleic acid molecule refers to an RNA or DNA molecule having a nucleotide sequence that occurs in nature (e.g., encodes a natural polypeptide).

[2814] In addition to naturally-occurring allelic variants of the 8099, 46455, 54414, 53763, 67076, 67102, 44181, 67084FL, or 67084alt sequences that may exist in the population, the skilled artisan will further appreciate that changes can be introduced by mutation into the nucleotide sequences of SEQ ID NO:46, 48, 49, 51, 52, 54, 55, 57, 58, 60, 61, 63, 64, 66, 67, 69, 70, or 72, or the nucleotide sequence of the DNA insert of the plasmid deposited with ATCC as Accession Number ______, ______, ______, ______, or ______, thereby leading to changes in the amino acid sequence of the encoded 8099, 46455, 54414, 53763, 67076, 67102, 44181, 67084FL, or 67084alt polypeptides, without altering the functional ability of the 8099, 46455, 54414, 53763, 67076, 67102, 44181, 67084FL, or 67084alt polypeptides. For example, nucleotide substitutions leading to amino acid substitutions at “non-essential” amino acid residues can be made in the sequence of SEQ ID NO:46, 48, 49, 51, 52, 54, 55, 57, 58, 60, 61, 63, 64, 66, 67, 69, 70, or 72, or the nucleotide sequence of the DNA insert of the plasmid deposited with ATCC as Accession Number ______, ______, ______, ______, or ______. A “non-essential” amino acid residue is a residue that can be altered from the wild-type sequence of 8099, 46455, 54414, 53763, 67076, 67102, 44181, 67084FL, or 67084alt (e.g., the sequence of SEQ ID NO:47, 50, 53, 56, 59, 62, 65, 68, or 71) without altering the biological activity, whereas an “essential” amino acid residue is required for biological activity.

[2815] For example, amino acid residues that are conserved among the 8099 or 46455 polypeptides of the present invention, e.g., those present in a transmembrane domain and/or a sugar transporter family domain, are predicted to be particularly unamenable to alteration. Furthermore, additional amino acid residues that are conserved between the 8099 or 46455 polypeptides of the present invention and other members of the 8099 or 46455 family are not likely to be amenable to alteration.

[2816] Amino acid residues that are conserved among the 54414 or 53763 polypeptides of the present invention, e.g., those present in a P-loop or a pore domain, are predicted to be particularly unamenable to alteration. Furthermore, additional amino acid residues that are conserved between the 54414 or 53763 polypeptides of the present invention and other members of the potassium channel family are not likely to be amenable to alteration.

[2817] Amino acid residues that are conserved among the 67076, 67102, 44181, 67084FL, or 67084alt polypeptides of the present invention, e.g., those present in a E1-E2 ATPases phosphorylation site, are predicted to be particularly unamenable to alteration. Furthermore, additional amino acid residues that are conserved between the 67076, 67102, 44181, 67084FL, or 67084alt polypeptides of the present invention and other members of the phospholipid transporter family are not likely to be amenable to alteration.

[2818] Accordingly, another aspect of the invention pertains to nucleic acid molecules encoding 8099, 46455, 54414, 53763, 67076, 67102, 44181, 67084FL, or 67084alt polypeptides that contain changes in amino acid residues that are not essential for activity. Such 8099, 46455, 54414, 53763, 67076, 67102, 44181, 67084FL, or 67084alt polypeptides differ in amino acid sequence from SEQ ID NO:47, 50, 53, 56, 59, 62, 65, 68, or 71, yet retain biological activity. In one embodiment, the isolated nucleic acid molecule comprises a nucleotide sequence encoding a polypeptide, wherein the polypeptide comprises an amino acid sequence at least about 50%, 55%, 60%, 65%, 70%, 75%, 80%, 85%, 90%, 95%, 96%, 97%, 98%, 99% or more identical to SEQ ID NO:47, 50, 53, 56, 59, 62, 65, 68, or 71 (e.g., to the entire length of SEQ ID NO:47, 50, 53, 56, 59, 62, 65, 68, or 71).

[2819] An isolated nucleic acid molecule encoding a 8099, 46455, 54414, 53763, 67076, 67102, 44181, 67084FL, or 67084alt polypeptide identical to the polypeptide of SEQ ID NO:47, 50, 53, 56, 59, 62, 65, 68, or 71, can be created by introducing one or more nucleotide substitutions, additions or deletions into the nucleotide sequence of SEQ ID NO:46, 48, 49, 51, 52, 54, 55, 57, 58, 60, 61, 63, 64, 66, 67, 69, 70, or 72, or the nucleotide sequence of the DNA insert of the plasmid deposited with ATCC as Accession Number ______, ______, ______, ______, or ______, such that one or more amino acid substitutions, additions or deletions are introduced into the encoded polypeptide. Mutations can be introduced into SEQ ID NO:46, 48, 49, 51, 52, 54, 55, 57, 58, 60, 61, 63, 64, 66, 67, 69, 70, or 72, or the nucleotide sequence of the DNA insert of the plasmid deposited with ATCC as Accession Number ______, ______, ______, ______, or ______ by standard techniques, such as site-directed mutagenesis and PCR-mediated mutagenesis. Preferably, conservative amino acid substitutions are made at one or more predicted non-essential amino acid residues. A “conservative amino acid substitution” is one in which the amino acid residue is replaced with an amino acid residue having a similar side chain. Families of amino acid residues having similar side chains have been defined in the art. These families include amino acids with basic side chains (e.g., lysine, arginine, histidine), acidic side chains (e.g., aspartic acid, glutamic acid), uncharged polar side chains (e.g., glycine, asparagine, glutamine, serine, threonine, tyrosine, cysteine, tryptophan), nonpolar side chains (e.g., alanine, valine, leucine, isoleucine, proline, phenylalanine, methionine), beta-branched side chains (e.g., threonine, valine, isoleucine) and aromatic side chains (e.g., tyrosine, phenylalanine, tryptophan, histidine). Thus, a predicted nonessential amino acid residue in a 8099, 46455, 54414, 53763, 67076, 67102, 44181, 67084FL, or 67084alt polypeptide is preferably replaced with another amino acid residue from the same side chain family. Alternatively, in another embodiment, mutations can be introduced randomly along all or part of a 8099, 46455, 54414, 53763, 67076, 67102, 44181, 67084FL, or 67084alt coding sequence, such as by saturation mutagenesis, and the resultant mutants can be screened for 8099, 46455, 54414, 53763, 67076, 67102, 44181, 67084FL, or 67084alt biological activity to identify mutants that retain activity. Following mutagenesis of SEQ ID NO:46, 48, 49, 51, 52, 54, 55, 57, 58, 60, 61, 63, 64, 66, 67, 69, 70, or 72, or the nucleotide sequence of the DNA insert of the plasmid deposited with ATCC as Accession Number ______, ______, ______, ______, ______, ______, ______, ______, or ______, the encoded polypeptide can be expressed recombinantly and the activity of the polypeptide can be determined.

[2820] In a preferred embodiment, a mutant 8099 and/or 46455 polypeptide can be assayed for the ability to (1) bind a monosaccharide, e.g., D-glucose, D-fructose, D-galactose, and/or mannose, (2) transport monosaccharides across a cell membrane, (3) influence insulin and/or glucagon secretion, (4) maintain sugar homeostasis in a cell, (5) function as a neuronal transporter, and (6) mediate trans-epithelial movement in a cell.

[2821] In another preferred embodiment, a mutant 54414 and/or 53763 protein can be assayed for the ability to (i) interact with a 54414 and/or 53763 substrate (e.g., a potassium ion or a cyclic nucleotide); (ii) conduct or transport a 54414 and/or 53763 substrate across a cellular membrane; (iii) interact with a second non-54414 and/or 53763 protein (e.g., a 54414 and/or 53763 polypeptide or a 54414 and/or 53763-potassium channel subunit); (iv) modulate (e.g., maintain and/or rectify) membrane potentials; (v) regulate target molecule availability or activity; (vi) modulate intra- or intercellular signaling and/or gene transcription (e.g., either directly or indirectly); (viii) generate outwardly rectifying currents; (viii) modulate membrane excitability; (ix) modulate the release of neurotransmitters; (x) regulate contractility (e.g., of smooth muscle cells), secretion, and/or synaptic transmission; and/or (xi) modulate processes which underlie learning and memory.

[2822] In a further preferred embodiment, a mutant 54414 protein can be assayed for the ability to (i) interact with maxi-K potassium channels (i.e., large conductance channels, in particular Slo); (ii) modulate maxi-K potassium channel activity (e.g., Slo-mediated activities); (iii) generate intermediate conductance channels; and/or (iv) regulate contractility (e.g., of smooth muscle cells), secretion, and/or synaptic transmission, in particular, via modulation of Slo.

[2823] In still a further preferred embodiment, a mutant 53763 protein can be assayed for the ability to (i) interact with Shaker (Sh) potassium channels and/or channel subunits; (ii) modulate Shaker (Sh) potassium channel activity (e.g., termination of prolonged membrane depolarization); and/or (iii) modulation of high voltage activating channel activity and/or inactivating channel activity, and the like.

[2824] In yet another preferred embodiment, a mutant 67076, 67102, 44181, 67084FL, and/or 67084alt polypeptide can be assayed for the ability to (i) interact with a 67076, 67102, 44181, 67084FL, or 67084alt substrate or target molecule (e.g., a phospholipid, ATP, or a non-67076, 67102, 44181, 67084FL, or 67084alt protein); (ii) transport a 67076, 67102, 44181, 67084FL, or 67084alt substrate or target molecule (e.g., an aminophospholipid such as phosphatidylserine or phosphatidylethanolamine) from one side of a cellular membrane to the other; (iii) be phosphorylated or dephosphorylated; (iv) adopt an E1 conformation or an E2 conformation; (v) convert a 67076, 67102, 44181, 67084FL, or 67084alt substrate or target molecule to a product (e.g., hydrolysis of ATP); (vi) interact with a second non-67076, 67102, 44181, 67084FL, or 67084alt protein; (vii) modulate substrate or target molecule location (e.g., modulation of phospholipid location within a cell and/or location with respect to a cellular membrane); (viii) maintain aminophospholipid gradients; (ix) modulate intra- or intercellular signaling and/or gene transcription (e.g., either directly or indirectly); and/or (x) modulate cellular proliferation, growth, differentiation, apoptosis, absorption, or secretion.

[2825] In addition to the nucleic acid molecules encoding 8099, 46455, 54414, 53763, 67076, 67102, 44181, 67084FL, or 67084alt polypeptides described above, another aspect of the invention pertains to isolated nucleic acid molecules which are antisense thereto. In an exemplary embodiment, the invention provides an isolated nucleic acid molecule which is antisense to a 8099, 46455, 54414, 53763, 67076, 67102, 44181, 67084FL, or 67084alt nucleic acid molecule (e.g., is antisense to the coding strand of a 8099, 46455, 54414, 53763, 67076, 67102, 44181, 67084FL, or 67084alt nucleic acid molecule). An “antisense” nucleic acid comprises a nucleotide sequence which is complementary to a “sense” nucleic acid encoding a polypeptide, e.g., complementary to the coding strand of a double-stranded cDNA molecule or complementary to an mRNA sequence. Accordingly, an antisense nucleic acid can hydrogen bond to a sense nucleic acid. The antisense nucleic acid can be complementary to an entire 8099, 46455, 54414, 53763, 67076, 67102, 44181, 67084FL, or 67084alt coding strand, or to only a portion thereof. In one embodiment, an antisense nucleic acid molecule is antisense to a “coding region” of the coding strand of a nucleotide sequence encoding 8099, 46455, 54414, 53763, 67076, 67102, 44181, 67084FL, or 67084alt. The term “coding region” refers to the region of the nucleotide sequence comprising codons which are translated into amino acid residues (e.g., the coding regions of human 8099, 46455, 54414, 53763, 67076, 67102, 44181, 67084FL, and 67084alt correspond to SEQ ID NO:48, 51, 54, 57, 60, 63, 66, 69, and 72, respectively). In another embodiment, the antisense nucleic acid molecule is antisense to a “noncoding region” of the coding strand of a nucleotide sequence encoding 8099, 46455, 54414, 53763, 67076, 67102, 44181, 67084FL, or 67084alt. The term “noncoding region” refers to 5′ and 3′ sequences which flank the coding region that are not translated into amino acids (i.e., also referred to as 5′ and 3′ untranslated regions).

[2826] Given the coding strand sequences encoding 8099, 46455, 54414, 53763, 67076, 67102, 44181, 67084FL, or 67084alt disclosed herein (e.g., SEQ ID NO:48, 51, 54, 57, 60, 63, 66, 69, and 72), antisense nucleic acids of the invention can be designed according to the rules of Watson and Crick base pairing. The antisense nucleic acid molecule can be complementary to the entire coding region of 8099, 46455, 54414, 53763, 67076, 67102, 44181, 67084FL, or 67084alt mRNA, but more preferably is an oligonucleotide which is antisense to only a portion of the coding or noncoding region of 8099, 46455, 54414, 53763, 67076, 67102, 44181, 67084FL, or 67084alt mRNA. For example, the antisense oligonucleotide can be complementary to the region surrounding the translation start site of 8099, 46455, 54414, 53763, 67076, 67102, 44181, 67084FL, or 67084alt mRNA (e.g., between the −10 and +10 regions of the start site of a gene nucleotide sequence). An antisense oligonucleotide can be, for example, about 5, 10, 15, 20, 25, 30, 35, 40, 45 or 50 nucleotides in length. An antisense nucleic acid of the invention can be constructed using chemical synthesis and enzymatic ligation reactions using procedures known in the art. For example, an antisense nucleic acid (e.g., an antisense oligonucleotide) can be chemically synthesized using naturally occurring nucleotides or variously modified nucleotides designed to increase the biological stability of the molecules or to increase the physical stability of the duplex formed between the antisense and sense nucleic acids, e.g., phosphorothioate derivatives and acridine substituted nucleotides can be used. Examples of modified nucleotides which can be used to generate the antisense nucleic acid include 5-fluorouracil, 5-bromouracil, 5-chlorouracil, 5-iodouracil, hypoxanthine, xantine, 4-acetylcytosine, 5-(carboxyhydroxylmethyl) uracil, 5-carboxymethylaminomethyl-2-thiouridine, 5-carboxymethylaminomethyluracil, dihydrouracil, beta-D-galactosylqueosine, inosine, N6-isopentenyladenine, 1-methylguanine, 1-methylinosine, 2,2-dimethylguanine, 2-methyladenine, 2-methylguanine, 3-methylcytosine, 5-methylcytosine, N6-adenine, 7-methylguanine, 5-methylaminomethyluracil, 5-methoxyaminomethyl-2-thiouracil, beta-D-mannosylqueosine, 5′-methoxycarboxymethyluracil, 5-methoxyuracil, 2-methylthio-N6-isopentenyladenine, uracil-5-oxyacetic acid (v), wybutoxosine, pseudouracil, queosine, 2-thiocytosine, 5-methyl-2-thiouracil, 2-thiouracil, 4-thiouracil, 5-methyluracil, uracil-5-oxyacetic acid methylester, uracil-5-oxyacetic acid (v), 5-methyl-2-thiouracil, 3-(3-amino-3-N-2-carboxypropyl) uracil, (acp3)w, and 2,6-diaminopurine. Alternatively, the antisense nucleic acid can be produced biologically using an expression vector into which a nucleic acid has been subcloned in an antisense orientation (i.e., RNA transcribed from the inserted nucleic acid will be of an antisense orientation to a target nucleic acid of interest, described further in the following subsection).

[2827] The antisense nucleic acid molecules of the invention are typically administered to a subject or generated in situ such that they hybridize with or bind to cellular mRNA and/or genomic DNA encoding a 8099, 46455, 54414, 53763, 67076, 67102, 44181, 67084FL, or 67084alt polypeptide to thereby inhibit expression of the polypeptide, e.g., by inhibiting transcription and/or translation. The hybridization can be by conventional nucleotide complementarity to form a stable duplex, or, for example, in the case of an antisense nucleic acid molecule which binds to DNA duplexes, through specific interactions in the major groove of the double helix. An example of a route of administration of antisense nucleic acid molecules of the invention include direct injection at a tissue site. Alternatively, antisense nucleic acid molecules can be modified to target selected cells and then administered systemically. For example, for systemic administration, antisense molecules can be modified such that they specifically bind to receptors or antigens expressed on a selected cell surface, e.g., by linking the antisense nucleic acid molecules to peptides or antibodies which bind to cell surface receptors or antigens. The antisense nucleic acid molecules can also be delivered to cells using the vectors described herein. To achieve sufficient intra-cellular concentrations of the antisense molecules, vector constructs in which the antisense nucleic acid molecule is placed under the control of a strong pol II or pol III promoter are preferred.

[2828] In yet another embodiment, the antisense nucleic acid molecule of the invention is an α-anomeric nucleic acid molecule. An α-anomeric nucleic acid molecule forms specific double-stranded hybrids with complementary RNA in which, contrary to the usual β-units, the strands run parallel to each other (Gaultier et al. (1987) Nucleic Acids. Res. 15:6625-6641). The antisense nucleic acid molecule can also comprise a 2′-o-methylribonucleotide (Inoue et al. (1987) Nucleic Acids Res. 15:6131-6148) or a chimeric RNA-DNA analogue (Inoue et al. (1987) FEBS Lett. 215:327-330).

[2829] In still another embodiment, an antisense nucleic acid of the invention is a ribozyme. Ribozymes are catalytic RNA molecules with ribonuclease activity which are capable of cleaving a single-stranded nucleic acid, such as an mRNA, to which they have a complementary region. Thus, ribozymes (e.g., hammerhead ribozymes (described in Haseloff and Gerlach (1988) Nature 334:585-591)) can be used to catalytically cleave 8099, 46455, 54414, 53763, 67076, 67102, 44181, 67084FL, or 67084alt mRNA transcripts to thereby inhibit translation of 8099, 46455, 54414, 53763, 67076, 67102, 44181, 67084FL, or 67084alt mRNA. A ribozyme having specificity for a 8099-, 46455-, 54414-, 53763-, 67076-, 67102-, 44181-, 67084FL-, or 67084alt-encoding nucleic acid can be designed based upon the nucleotide sequence of a 8099, 46455, 54414, 53763, 67076, 67102, 44181, 67084FL, or 67084alt cDNA disclosed herein (i.e., SEQ ID NO:46, 48, 49, 51, 52, 54, 55, 57, 58, 60, 61, 63, 64, 66, 67, 69, 70, or 72, or the nucleotide sequence of the DNA insert of the plasmid deposited with ATCC as Accession Number ______, ______, ______, ______, or ______). For example, a derivative of a Tetrahymena L-19 IVS RNA can be constructed in which the nucleotide sequence of the active site is complementary to the nucleotide sequence to be cleaved in a 8099-, 46455-, 54414-, 53763-, 67076-, 67102-, 44181-, 67084FL-, or 67084alt-encoding mRNA. See, e.g., Cech et al. U.S. Pat. No. 4,987,071; and Cech et al. U.S. Pat. No. 5,116,742. Alternatively, 8099, 46455, 54414, 53763, 67076, 67102, 44181, 67084FL, or 67084alt mRNA can be used to select a catalytic RNA having a specific ribonuclease activity from a pool of RNA molecules. See, e.g., Bartel, D. and Szostak, J. W. (1993) Science 261:1411-1418.

[2830] Alternatively, 8099, 46455, 54414, 53763, 67076, 67102, 44181, 67084FL, or 67084alt gene expression can be inhibited by targeting nucleotide sequences complementary to the regulatory region of the 8099, 46455, 54414, 53763, 67076, 67102, 44181, 67084FL, or 67084alt (e.g., the 8099, 46455, 54414, 53763, 67076, 67102, 44181, 67084FL, or 67084alt promoter and/or enhancers) to form triple helical structures that prevent transcription of the 8099, 46455, 54414, 53763, 67076, 67102, 44181, 67084FL, or 67084alt gene in target cells. See generally, Helene, C. (1991) Anticancer Drug Des. 6(6):569-84; Helene, C. et al. (1992) Ann. N.Y. Acad. Sci. 660:27-36; and Maher, L. J. (1992) Bioassays 14(12):807-15.

[2831] In yet another embodiment, the 8099, 46455, 54414, 53763, 67076, 67102, 44181, 67084FL, or 67084alt nucleic acid molecules of the present invention can be modified at the base moiety, sugar moiety or phosphate backbone to improve, e.g., the stability, hybridization, or solubility of the molecule. For example, the deoxyribose phosphate backbone of the nucleic acid molecules can be modified to generate peptide nucleic acids (see Hyrup B. et al. (1996) Bioorganic & Medicinal Chemistry 4 (1): 5-23). As used herein, the terms “peptide nucleic acids” or “PNAs” refer to nucleic acid mimics, e.g., DNA mimics, in which the deoxyribose phosphate backbone is replaced by a pseudopeptide backbone and only the four natural nucleobases are retained. The neutral backbone of PNAs has been shown to allow for specific hybridization to DNA and RNA under conditions of low ionic strength. The synthesis of PNA oligomers can be performed using standard solid phase peptide synthesis protocols as described in Hyrup B. et al. (1996) supra; Perry-O'Keefe et al. Proc. Natl. Acad. Sci. 93: 14670-675.

[2832] PNAs of 8099, 46455, 54414, 53763, 67076, 67102, 44181, 67084FL, or 67084alt nucleic acid molecules can be used in therapeutic and diagnostic applications. For example, PNAs can be used as antisense or antigene agents for sequence-specific modulation of gene expression by, for example, inducing transcription or translation arrest or inhibiting replication. PNAs of 8099, 46455, 54414, 53763, 67076, 67102, 44181, 67084FL, or 67084alt nucleic acid molecules can also be used in the analysis of single base pair mutations in a gene, (e.g., by PNA-directed PCR clamping); as ‘artificial restriction enzymes’ when used in combination with other enzymes, (e.g., S1 nucleases (Hyrup B. (1996) supra)); or as probes or primers for DNA sequencing or hybridization (Hyrup B. et al. (1996) supra; Perry-O'Keefe supra).

[2833] In another embodiment, PNAs of 8099, 46455, 54414, 53763, 67076, 67102, 44181, 67084FL, or 67084alt can be modified, (e.g., to enhance their stability or cellular uptake), by attaching lipophilic or other helper groups to PNA, by the formation of PNA-DNA chimeras, or by the use of liposomes or other techniques of drug delivery known in the art. For example, PNA-DNA chimeras of 8099, 46455, 54414, 53763, 67076, 67102, 44181, 67084FL, or 67084alt nucleic acid molecules can be generated which may combine the advantageous properties of PNA and DNA. Such chimeras allow DNA recognition enzymes, (e.g., RNase H and DNA polymerases), to interact with the DNA portion while the PNA portion would provide high binding affinity and specificity. PNA-DNA chimeras can be linked using linkers of appropriate lengths selected in terms of base stacking, number of bonds between the nucleobases, and orientation (Hyrup B. (1996) supra). The synthesis of PNA-DNA chimeras can be performed as described in Hyrup B. (1996) supra and Finn P. J. et al. (1996) Nucleic Acids Res. 24 (17): 3357-63. For example, a DNA chain can be synthesized on a solid support using standard phosphoramidite coupling chemistry and modified nucleoside analogs, e.g., 5′-(4-methoxytrityl) amino-5′-deoxy-thymidine phosphoramidite, can be used as a between the PNA and the 5′ end of DNA (Mag, M. et al. (1989) Nucleic Acid Res. 17: 5973-88). PNA monomers are then coupled in a stepwise manner to produce a chimeric molecule with a 5′ PNA segment and a 3′ DNA segment (Finn P. J. et al. (1996) supra). Alternatively, chimeric molecules can be synthesized with a 5′ DNA segment and a 3′ PNA segment (Peterser, K. H. et al. (1975) Bioorganic Med. Chem. Lett. 5: 1119-11124).

[2834] In other embodiments, the oligonucleotide may include other appended groups such as peptides (e.g., for targeting host cell receptors in vivo), or agents facilitating transport across the cell membrane (see, e.g., Letsinger et al. (1989) Proc. Natl. Acad. Sci. USA 86:6553-6556; Lemaitre et al. (1987) Proc. Natl. Acad. Sci. USA 84:648-652; PCT Publication No. W088/09810) or the blood-brain barrier (see, e.g., PCT Publication No. W089/10134). In addition, oligonucleotides can be modified with hybridization-triggered cleavage agents (See, e.g., Krol et al. (1988) Bio-Techniques 6:958-976) or intercalating agents. (See, e.g., Zon (1988) Pharm. Res. 5:539-549). To this end, the oligonucleotide may be conjugated to another molecule, (e.g., a peptide, hybridization triggered cross-linking agent, transport agent, or hybridization-triggered cleavage agent).

[2835] Alternatively, the expression characteristics of an endogenous 8099, 46455, 54414, 53763, 67076, 67102, 44181, 67084FL, or 67084alt gene within a cell line or microorganism may be modified by inserting a heterologous DNA regulatory element into the genome of a stable cell line or cloned microorganism such that the inserted regulatory element is operatively linked with the endogenous 8099, 46455, 54414, 53763, 67076, 67102, 44181, 67084FL, or 67084alt gene. For example, an endogenous 8099, 46455, 54414, 53763, 67076, 67102, 44181, 67084FL, or 67084alt gene which is normally “transcriptionally silent”, i.e., a 8099, 46455, 54414, 53763, 67076, 67102, 44181, 67084FL, or 67084alt gene which is normally not expressed, or is expressed only at very low levels in a cell line or microorganism, may be activated by inserting a regulatory element which is capable of promoting the expression of a normally expressed gene product in that cell line or microorganism. Alternatively, a transcriptionally silent, endogenous 8099, 46455, 54414, 53763, 67076, 67102, 44181, 67084FL, or 67084alt gene may be activated by insertion of a promiscuous regulatory element that works across cell types.

[2836] A heterologous regulatory element may be inserted into a stable cell line or cloned microorganism, such that it is operatively linked with an endogenous 8099, 46455, 54414, 53763, 67076, 67102, 44181, 67084FL, or 67084alt gene, using techniques, such as targeted homologous recombination, which are well known to those of skill in the art, and described, e.g., in Chappel, U.S. Pat. No. 5,272,071; PCT publication No. WO 91/06667, published May 16, 1991.

[2837] II. Isolated 8099, 46455, 54414, 53763, 67076, 67102, 44181, 67084FL, or 67084alt Polypeptides and Anti-8099, 46455, 54414, 53763, 67076, 67102, 44181, 67084FL, or 67084alt Antibodies

[2838] One aspect of the invention pertains to isolated 8099, 46455, 54414, 53763, 67076, 67102, 44181, 67084FL, or 67084alt or recombinant polypeptides and polypeptides, and biologically active portions thereof, as well as polypeptide fragments suitable for use as immunogens to raise anti-8099, 46455, 54414, 53763, 67076, 67102, 44181, 67084FL, or 67084alt antibodies. In one embodiment, native 8099, 46455, 54414, 53763, 67076, 67102, 44181, 67084FL, or 67084alt polypeptides can be isolated from cells or tissue sources by an appropriate purification scheme using standard protein purification techniques. In another embodiment, 8099, 46455, 54414, 53763, 67076, 67102, 44181, 67084FL, or 67084alt polypeptides are produced by recombinant DNA techniques. Alternative to recombinant expression, a 8099, 46455, 54414, 53763, 67076, 67102, 44181, 67084FL, or 67084alt polypeptide or polypeptide can be synthesized chemically using standard peptide synthesis techniques.

[2839] An “isolated” or “purified” polypeptide or biologically active portion thereof is substantially free of cellular material or other contaminating proteins from the cell or tissue source from which the 8099, 46455, 54414, 53763, 67076, 67102, 44181, 67084FL, or 67084alt polypeptide is derived, or substantially free from chemical precursors or other chemicals when chemically synthesized. The language “substantially free of cellular material” includes preparations of 8099, 46455, 54414, 53763, 67076, 67102, 44181, 67084FL, or 67084alt polypeptide in which the polypeptide is separated from cellular components of the cells from which it is isolated or recombinantly produced. In one embodiment, the language “substantially free of cellular material” includes preparations of 8099, 46455, 54414, 53763, 67076, 67102, 44181, 67084FL, or 67084alt polypeptide having less than about 30% (by dry weight) of non-8099, 46455, 54414, 53763, 67076, 67102, 44181, 67084FL, or 67084alt polypeptide (also referred to herein as a “contaminating protein”), more preferably less than about 20% of non-8099, 46455, 54414, 53763, 67076, 67102, 44181, 67084FL, or 67084alt polypeptide, still more preferably less than about 10% of non-8099, 46455, 54414, 53763, 67076, 67102, 44181, 67084FL, or 67084alt polypeptide, and most preferably less than about 5% non-8099, 46455, 54414, 53763, 67076, 67102, 44181, 67084FL, or 67084alt polypeptide. When the 8099, 46455, 54414, 53763, 67076, 67102, 44181, 67084FL, or 67084alt polypeptide or biologically active portion thereof is recombinantly produced, it is also preferably substantially free of culture medium, i.e., culture medium represents less than about 20%, more preferably less than about 10%, and most preferably less than about 5% of the volume of the protein preparation.

[2840] The language “substantially free of chemical precursors or other chemicals” includes preparations of 8099, 46455, 54414, 53763, 67076, 67102, 44181, 67084FL, or 67084alt polypeptide in which the polypeptide is separated from chemical precursors or other chemicals which are involved in the synthesis of the polypeptide. In one embodiment, the language “substantially free of chemical precursors or other chemicals” includes preparations of 8099, 46455, 54414, 53763, 67076, 67102, 44181, 67084FL, or 67084alt polypeptide having less than about 30% (by dry weight) of chemical precursors or non-8099, 46455, 54414, 53763, 67076, 67102, 44181, 67084FL, or 67084alt chemicals, more preferably less than about 20% chemical precursors or non-8099, 46455, 54414, 53763, 67076, 67102, 44181, 67084FL, or 67084alt chemicals, still more preferably less than about 10% chemical precursors or non-8099, 46455, 54414, 53763, 67076, 67102, 44181, 67084FL, or 67084alt chemicals, and most preferably less than about 5% chemical precursors or non-8099, 46455, 54414, 53763, 67076, 67102, 44181, 67084FL, or 67084alt chemicals.

[2841] As used herein, a “biologically active portion” of a 8099, 46455, 54414, 53763, 67076, 67102, 44181, 67084FL, or 67084alt polypeptide includes a fragment of a 8099, 46455, 54414, 53763, 67076, 67102, 44181, 67084FL, or 67084alt polypeptide which participates in an interaction between a 8099, 46455, 54414, 53763, 67076, 67102, 44181, 67084FL, or 67084alt molecule and a non-8099, 46455, 54414, 53763, 67076, 67102, 44181, 67084FL, or 67084alt molecule (e.g., a 8099, 46455, 54414, 53763, 67076, 67102, 44181, 67084FL, or 67084alt substrate). Biologically active portions of a 8099, 46455, 54414, 53763, 67076, 67102, 44181, 67084FL, or 67084alt polypeptide include peptides comprising amino acid sequences sufficiently identical to or derived from the amino acid sequence of the 8099, 46455, 54414, 53763, 67076, 67102, 44181, 67084FL, or 67084alt polypeptide, e.g., the amino acid sequence shown in SEQ ID NO:47, 50, 53, 56, 59, 62, 65, 68, or 71, which include less amino acids than the full length 8099, 46455, 54414, 53763, 67076, 67102, 44181, 67084FL, or 67084alt polypeptides, and exhibit at least one activity of a 8099, 46455, 54414, 53763, 67076, 67102, 44181, 67084FL, or 67084alt polypeptide.

[2842] Typically, biologically active portions of a 8099 or 46455 polypeptide comprise a domain or motif with at least one activity of the 8099 or 46455 polypeptide, e.g., modulating sugar transport mechanisms. A biologically active portion of an 8099 polypeptide can be a polypeptide which is, for example, 25, 30, 35, 40, 45, 50, 75, 100, 125, 150, 175, 200, 225, 250, 275, 300, 325, 350, 375, 400, 425, 450, 475, 500, 525, 550, 600 or more amino acids in length. A biologically active portion of an 46455 polypeptide can be a polypeptide which is, for example, 25, 30, 35, 40, 45, 50, 75, 100, 125, 150, 175, 200, 225, 250, 275, 300, 325, 350, 375, 400, 425, 450, 475, 500, 525 or more amino acids in length. Biologically active portions of an 8099 and/or an 46455 polypeptide can be used as targets for developing agents which modulate an 8099 or 46455 mediated activity, e.g., a sugar transport mechanism.

[2843] In one embodiment, a biologically active portion of an 8099 or an 46455 polypeptide comprises at least one transmembrane domain. It is to be understood that a preferred biologically active portion of an 8099 or an 46455 polypeptide of the present invention comprises at least one or more of the following domains: a transmembrane domain and/or a sugar transporter family domain. Moreover, other biologically active portions, in which other regions of the polypeptide are deleted, can be prepared by recombinant techniques and evaluated for one or more of the functional activities of a native 8099 or 46455 polypeptide.

[2844] Moreover, biologically active portions of a 54414 or 53763 polypeptide comprise a domain or motif with at least one activity of the 54414 or 53763 polypeptide, e.g., modulation of intra- or inter-cellular signaling and/or gene expression, and/or modulate membrane excitability. A biologically active portion of a 54414 or 53763 polypeptide can be a polypeptide which is, for example, 10, 25, 50, 75, 100, 125, 150 or more amino acids in length. Biologically active portions of a 54414 or 53763 polypeptide can be used as targets for developing agents which modulate a 54414 or 53763 mediated activity, e.g., modulation of intra- or inter-cellular signaling and/or gene expression, and/or modulate membrane excitability.

[2845] In one embodiment, a biologically active portion of a 54414 or 53763 polypeptide comprises at least one transmembrane domain and/or a pore domain. Moreover, other biologically active portions, in which other regions of the protein are deleted, can be prepared by recombinant techniques and evaluated for one or more of the functional activities of a native 54414 or 53763 polypeptide.

[2846] Biologically active portions of a 67076, 67102, 44181, 67084FL, or 67084alt polypeptide comprise a domain or motif with at least one activity of the 67076, 67102, 44181, 67084FL, or 67084alt polypeptide, e.g., the ability to interact with a 67076, 67102, 44181, 67084FL, or 67084alt substrate or target molecule (e.g., a phospholipid; ATP; a non-67076, 67102, 44181, 67084FL, or 67084alt protein; or another 67076, 67102, 44181, 67084FL, or 67084alt protein or subunit); the ability to transport a 67076, 67102, 44181, 67084FL, or 67084alt substrate or target molecule (e.g., a phospholipid) from one side of a cellular membrane to the other; the ability to be phosphorylated or dephosphorylated; the ability to adopt an E1 conformation or an E2 conformation; the ability to convert a 67076, 67102, 44181, 67084FL, or 67084alt substrate or target molecule to a product (e.g., the ability to hydrolyze ATP); the ability to interact with a second non-67076, 67102, 44181, 67084FL, or 67084alt protein; the ability to modulate intra- or inter-cellular signaling and/or gene transcription (e.g., either directly or indirectly); the ability to modulate cellular growth, proliferation, differentiation, absorption, and/or secretion. A biologically active portion of a 67076, 67102, 44181, 67084FL, or 67084alt polypeptide can be a polypeptide which is, for example, 10, 25, 50, 75, 100, 125, 150, 175, 200, 250, 300, 350, 400, 450, 500, 550, 600, 650, 700, 750, 800, 850, 900, 950, 1000, 1050, 1100, 1150, 1200, 1250, 1300, 1350, 1400, 1450, 1500, 1550 or more amino acids in length. Biologically active portions of a 67076, 67102, 44181, 67084FL, or 67084alt polypeptide can be used as targets for developing agents which modulate a 67076, 67102, 44181, 67084FL, or 67084alt mediated activity, e.g., modulating transport of biological molecules across membranes.

[2847] In one embodiment, a biologically active portion of a 67076, 67102, 44181, 67084FL, or 67084alt polypeptide comprises at least one at least one or more of the following domains, sites, or motifs: a transmembrane domain, an N-terminal large extramembrane domain, a C-terminal large extramembrane domain, an E1-E2 ATPases phosphorylation site, a P-type ATPase sequence 1 motif, a P-type ATPase sequence 2 motif, a P-type ATPase sequence 3 motif, and/or one or more phospholipid transporter specific amino acid resides. Moreover, other biologically active portions, in which other regions of the polypeptide are deleted, can be prepared by recombinant techniques and evaluated for one or more of the functional activities of a native 67076, 67102, 44181, 67084FL, or 67084alt polypeptide.

[2848] Another aspect of the invention features fragments of the polypeptide having the amino acid sequence of SEQ ID NO:47, 50, 53, 56, 59, 62, 65, 68, or 71, for example, for use as immunogens. In one embodiment, a fragment comprises at least 5 amino acids (e.g., contiguous or consecutive amino acids) of the amino acid sequence of SEQ ID NO:47, 50, 53, 56, 59, 62, 65, 68, or 71, or an amino acid sequence encoded by the DNA insert of the plasmid deposited with the ATCC as Accession Number ______, ______, ______, ______, or ______. In another embodiment, a fragment comprises at least 10, 15, 20, 25, 30, 35, 40, 45, 50 or more amino acids (e.g., contiguous or consecutive amino acids) of the amino acid sequence of SEQ ID NO:47, 50, 53, 56, 59, 62, 65, 68, or 71, or an amino acid sequence encoded by the DNA insert of the plasmid deposited with the ATCC as Accession Number ______, ______, ______, ______, or ______.

[2849] In a preferred embodiment, a 8099, 46455, 54414, 53763, 67076, 67102, 44181, 67084FL, or 67084alt polypeptide has an amino acid sequence shown in SEQ ID NO:47, 50, 53, 56, 59, 62, 65, 68, or 71. In other embodiments, the 8099, 46455, 54414, 53763, 67076, 67102, 44181, 67084FL, or 67084alt polypeptide is substantially identical to SEQ ID NO:47, 50, 53, 56, 59, 62, 65, 68, or 71, and retains the functional activity of the polypeptide of SEQ ID NO:47, 50, 53, 56, 59, 62, 65, 68, or 71, yet differs in amino acid sequence due to natural allelic variation or mutagenesis, as described in detail in subsection I above. In another embodiment, the 8099, 46455, 54414, 53763, 67076, 67102, 44181, 67084FL, or 67084alt polypeptide is a polypeptide which comprises an amino acid sequence at least about 50%, 55%, 60%, 65%, 70%, 75%, 80%, 85%, 90%, 95%, 96%, 97%, 98%, 99% or more identical to SEQ ID NO:47, 50, 53, 56, 59, 62, 65, 68, or 71.

[2850] In another embodiment, the invention features a 8099, 46455, 54414, 53763, 67076, 67102, 44181, 67084FL, or 67084alt polypeptide which is encoded by a nucleic acid molecule consisting of a nucleotide sequence at least about 50%, 55%, 60%, 65%, 70%, 75%, 80%, 85%, 90%, 95%, 96%, 97%, 98%, 99% or more identical to a nucleotide sequence of SEQ ID NO:46, 48, 49, 51, 52, 54, 55, 57, 58, 60, 61, 63, 64, 66, 67, 69, 70, or 72, or a complement thereof. This invention further features a 8099, 46455, 54414, 53763, 67076, 67102, 44181, 67084FL, or 67084alt polypeptide which is encoded by a nucleic acid molecule consisting of a nucleotide sequence which hybridizes under stringent hybridization conditions to a complement of a nucleic acid molecule comprising the nucleotide sequence of SEQ ID NO:46, 48, 49, 51, 52, 54, 55, 57, 58, 60, 61, 63, 64, 66, 67, 69, 70, or 72, or a complement thereof.

[2851] To determine the percent identity of two amino acid sequences or of two nucleic acid sequences, the sequences are aligned for optimal comparison purposes (e.g., gaps can be introduced in one or both of a first and a second amino acid or nucleic acid sequence for optimal alignment and non-identical sequences can be disregarded for comparison purposes). In a preferred embodiment, the length of a reference sequence aligned for comparison purposes is at least 30%, preferably at least 40%, more preferably at least 50%, even more preferably at least 60%, and even more preferably at least 70%, 80%, or 90% of the length of the reference sequence (e.g., when aligning a second sequence to the 8099 amino acid sequence of SEQ ID NO:47 having 617 amino acid residues, at least 185, preferably at least 246, more preferably at least 308, more preferably at least 370, even more preferably at least 431, and even more preferably at least 493 or 555 or more amino acid residues are aligned. In another preferred embodiment, the sequences being aligned for comparison purposes are globally aligned and percent identity is determined over the entire length of the sequences aligned. The amino acid residues or nucleotides at corresponding amino acid positions or nucleotide positions are then compared. When a position in the first sequence is occupied by the same amino acid residue or nucleotide as the corresponding position in the second sequence, then the molecules are identical at that position (as used herein amino acid or nucleic acid “identity” is equivalent to amino acid or nucleic acid “homology”). The percent identity between the two sequences is a function of the number of identical positions shared by the sequences, taking into account the number of gaps, and the length of each gap, which need to be introduced for optimal alignment of the two sequences.

[2852] The comparison of sequences and determination of percent identity between two sequences can be accomplished using a mathematical algorithm. In a preferred embodiment, the percent identity between two amino acid sequences is determined using the Needleman and Wunsch (J. Mol. Biol. (48):444-453 (1970)) algorithm which has been incorporated into the GAP program in the GCG software package (available at the Accelrys website), using either a Blosum 62 matrix or a PAM250 matrix, and a gap weight of 16, 14, 12, 10, 8, 6, or 4 and a length weight of 1, 2, 3, 4, 5, or 6. In yet another preferred embodiment, the percent identity between two nucleotide sequences is determined using the GAP program in the GCG software package, using a NWSgapdna.CMP matrix and a gap weight of 40, 50, 60, 70, or 80 and a length weight of 1, 2, 3, 4, 5, or 6. A preferred, non-limiting example of parameters to be used in conjunction with the GAP program include a Blosum 62 scoring matrix with a gap penalty of 12, a gap extend penalty of 4, and a frameshift gap penalty of 5.

[2853] In another embodiment, the percent identity between two amino acid or nucleotide sequences is determined using the algorithm of E. Meyers and W. Miller (Comput. Appl. Biosci., 4:11-17 (1988)) which has been incorporated into the ALIGN program (version 2.0 or version 2.0U), using a PAM120 weight residue table, a gap length penalty of 12 and a gap penalty of 4.

[2854] The nucleic acid and polypeptide sequences of the present invention can further be used as a “query sequence” to perform a search against public databases to, for example, identify other family members or related sequences. Such searches can be performed using the NBLAST and XBLAST programs (version 2.0) of Altschul, et al. (1990) J. Mol. Biol. 215:403-10. BLAST nucleotide searches can be performed with the NBLAST program, score=100, wordlength=12 to obtain nucleotide sequences homologous to 8099, 46455, 54414, 53763, 67076, 67102, 44181, 67084FL, or 67084alt nucleic acid molecules of the invention. BLAST protein searches can be performed with the XBLAST program, score=100, wordlength=3, and a Blosum62 matrix to obtain amino acid sequences homologous to 8099, 46455, 54414, 53763, 67076, 67102, 44181, 67084FL, or 67084alt polypeptide molecules of the invention. To obtain gapped alignments for comparison purposes, Gapped BLAST can be utilized as described in Altschul et al., (1997) Nucleic Acids Res. 25(17):3389-3402. When utilizing BLAST and Gapped BLAST programs, the default parameters of the respective programs (e.g., XBLAST and NBLAST) can be used. See the National Center for Biotechnology website.

[2855] The invention also provides 8099, 46455, 54414, 53763, 67076, 67102, 44181, 67084FL, or 67084alt chimeric or fusion proteins. As used herein, a 8099, 46455, 54414, 53763, 67076, 67102, 44181, 67084FL, or 67084alt “chimeric protein” or “fusion protein” comprises a 8099, 46455, 54414, 53763, 67076, 67102, 44181, 67084FL, or 67084alt polypeptide operatively linked to a non-8099, 46455, 54414, 53763, 67076, 67102, 44181, 67084FL, or 67084alt polypeptide. A “8099, 46455, 54414, 53763, 67076, 67102, 44181, 67084FL, or 67084alt polypeptide” refers to a polypeptide having an amino acid sequence corresponding to a 8099, 46455, 54414, 53763, 67076, 67102, 44181, 67084FL, or 67084alt polypeptide whereas a “non-8099, 46455, 54414, 53763, 67076, 67102, 44181, 67084FL, or 67084alt polypeptide” refers to a polypeptide having an amino acid sequence corresponding to a polypeptide which is not substantially homologous to the 8099, 46455, 54414, 53763, 67076, 67102, 44181, 67084FL, or 67084alt polypeptides, respectively, e.g., a polypeptide which is different from the 8099, 46455, 54414, 53763, 67076, 67102, 44181, 67084FL, or 67084alt polypeptide and which is derived from the same or a different organism. Within a 8099, 46455, 54414, 53763, 67076, 67102, 44181, 67084FL, or 67084alt fusion protein the 8099, 46455, 54414, 53763, 67076, 67102, 44181, 67084FL, or 67084alt polypeptide can correspond to all or a portion of a 8099, 46455, 54414, 53763, 67076, 67102, 44181, 67084FL, or 67084alt polypeptide. In a preferred embodiment, a 8099, 46455, 54414, 53763, 67076, 67102, 44181, 67084FL, or 67084alt fusion protein comprises at least one biologically active portion of a 8099, 46455, 54414, 53763, 67076, 67102, 44181, 67084FL, or 67084alt polypeptide. In another preferred embodiment, a 8099, 46455, 54414, 53763, 67076, 67102, 44181, 67084FL, or 67084alt fusion protein comprises at least two biologically active portions of a 8099, 46455, 54414, 53763, 67076, 67102, 44181, 67084FL, or 67084alt polypeptide. Within the fusion protein, the term “operatively linked” is intended to indicate that the 8099, 46455, 54414, 53763, 67076, 67102, 44181, 67084FL, or 67084alt polypeptide and the non-8099, 46455, 54414, 53763, 67076, 67102, 44181, 67084FL, or 67084alt polypeptide are fused in-frame to each other. The non-8099, 46455, 54414, 53763, 67076, 67102, 44181, 67084FL, or 67084alt polypeptide can be fused to the N-terminus or C-terminus of the 8099, 46455, 54414, 53763, 67076, 67102, 44181, 67084FL, or 67084alt polypeptide.

[2856] For example, in one embodiment, the fusion protein is a GST-8099, -46455, -54414, -53763, -67076, -67102, -44181, -67084FL, or -67084alt fusion protein in which the 8099, 46455, 54414, 53763, 67076, 67102, 44181, 67084FL, or 67084alt sequences are fused to the C-terminus of the GST sequences. Such fusion proteins can facilitate the purification of recombinant 8099, 46455, 54414, 53763, 67076, 67102, 44181, 67084FL, or 67084alt.

[2857] In another embodiment, the fusion protein is a 8099, 46455, 54414, 53763, 67076, 67102, 44181, 67084FL, or 67084alt polypeptide containing a heterologous signal sequence at its N-terminus. In certain host cells (e.g., mammalian host cells), expression and/or secretion of 8099, 46455, 54414, 53763, 67076, 67102, 44181, 67084FL, or 67084alt can be increased through the use of a heterologous signal sequence.

[2858] The 8099, 46455, 54414, 53763, 67076, 67102, 44181, 67084FL, or 67084alt fusion proteins of the invention can be incorporated into pharmaceutical compositions and administered to a subject in vivo. The 8099, 46455, 54414, 53763, 67076, 67102, 44181, 67084FL, or 67084alt fusion proteins can be used to affect the bioavailability of a 8099, 46455, 54414, 53763, 67076, 67102, 44181, 67084FL, or 67084alt substrate. Use of 8099, 46455, 54414, 53763, 67076, 67102, 44181, 67084FL, or 67084alt fusion proteins may be useful therapeutically for the treatment of disorders caused by, for example, (i) aberrant modification or mutation of a gene encoding a 8099, 46455, 54414, 53763, 67076, 67102, 44181, 67084FL, or 67084alt polypeptide; (ii) mis-regulation of the 8099, 46455, 54414, 53763, 67076, 67102, 44181, 67084FL, or 67084alt gene; and (iii) aberrant post-translational modification of a 8099, 46455, 54414, 53763, 67076, 67102, 44181, 67084FL, or 67084alt polypeptide.

[2859] Moreover, the 8099, 46455, 54414, 53763, 67076, 67102, 44181, 67084FL, or 67084alt-fusion proteins of the invention can be used as immunogens to produce anti-8099, anti-46455, anti-54414, anti-53763, anti-67076, anti-67102, anti-44181, anti-67084FL, and/or anti-67084alt antibodies in a subject, to purify 8099, 46455, 54414, 53763, 67076, 67102, 44181, 67084FL, or 67084alt ligands and in screening assays to identify molecules which inhibit the interaction with or transport of 8099, 46455, 54414, 53763, 67076, 67102, 44181, 67084FL, or 67084alt with a 8099, 46455, 54414, 53763, 67076, 67102, 44181, 67084FL, or 67084alt substrate.

[2860] Preferably, a 8099, 46455, 54414, 53763, 67076, 67102, 44181, 67084FL, or 67084alt chimeric or fusion protein of the invention is produced by standard recombinant DNA techniques. For example, DNA fragments coding for the different polypeptide sequences are ligated together in-frame in accordance with conventional techniques, for example by employing blunt-ended or stagger-ended termini for ligation, restriction enzyme digestion to provide for appropriate termini, filling-in of cohesive ends as appropriate, alkaline phosphatase treatment to avoid undesirable joining, and enzymatic ligation. In another embodiment, the fusion gene can be synthesized by conventional techniques including automated DNA synthesizers. Alternatively, PCR amplification of gene fragments can be carried out using anchor primers which give rise to complementary overhangs between two consecutive gene fragments which can subsequently be annealed and reamplified to generate a chimeric gene sequence (see, for example, Current Protocols in Molecular Biology, eds. Ausubel et al. John Wiley & Sons: 1992). Moreover, many expression vectors are commercially available that already encode a fusion moiety (e.g., a GST polypeptide). A 8099, 46455, 54414, 53763, 67076, 67102, 44181, 67084FL, or 67084alt-encoding nucleic acid can be cloned into such an expression vector such that the fusion moiety is linked in-frame to the 8099, 46455, 54414, 53763, 67076, 67102, 44181, 67084FL, or 67084alt polypeptide.

[2861] The present invention also pertains to variants of the 8099, 46455, 54414, 53763, 67076, 67102, 44181, 67084FL, or 67084alt polypeptides which function as either 8099, 46455, 54414, 53763, 67076, 67102, 44181, 67084FL, or 67084alt agonists (mimetics) or as 8099, 46455, 54414, 53763, 67076, 67102, 44181, 67084FL, or 67084alt antagonists. Variants of the 8099, 46455, 54414, 53763, 67076, 67102, 44181, 67084FL, or 67084alt polypeptides can be generated by mutagenesis, e.g., discrete point mutation or truncation of a 8099, 46455, 54414, 53763, 67076, 67102, 44181, 67084FL, or 67084alt polypeptide. An agonist of the 8099, 46455, 54414, 53763, 67076, 67102, 44181, 67084FL, or 67084alt polypeptides can retain substantially the same, or a subset, of the biological activities of the naturally occurring form of a 8099, 46455, 54414, 53763, 67076, 67102, 44181, 67084FL, or 67084alt polypeptide. An antagonist of a 8099, 46455, 54414, 53763, 67076, 67102, 44181, 67084FL, or 67084alt polypeptide can inhibit one or more of the activities of the naturally occurring form of the 8099, 46455, 54414, 53763, 67076, 67102, 44181, 67084FL, or 67084alt polypeptide by, for example, competitively modulating a 8099, 46455, 54414, 53763, 67076, 67102, 44181, 67084FL, or 67084alt-mediated activity of a 8099, 46455, 54414, 53763, 67076, 67102, 44181, 67084FL, or 67084alt polypeptide. Thus, specific biological effects can be elicited by treatment with a variant of limited function. In one embodiment, treatment of a subject with a variant having a subset of the biological activities of the naturally occurring form of the polypeptide has fewer side effects in a subject relative to treatment with the naturally occurring form of the 8099, 46455, 54414, 53763, 67076, 67102, 44181, 67084FL, or 67084alt polypeptide.

[2862] In one embodiment, variants of a 8099, 46455, 54414, 53763, 67076, 67102, 44181, 67084FL, or 67084alt polypeptide which function as either 8099, 46455, 54414, 53763, 67076, 67102, 44181, 67084FL, or 67084alt agonists (mimetics) or as 8099, 46455, 54414, 53763, 67076, 67102, 44181, 67084FL, or 67084alt antagonists can be identified by screening combinatorial libraries of mutants, e.g., truncation mutants, of a 8099, 46455, 54414, 53763, 67076, 67102, 44181, 67084FL, or 67084alt polypeptide for 8099, 46455, 54414, 53763, 67076, 67102, 44181, 67084FL, or 67084alt polypeptide agonist or antagonist activity. In one embodiment, a variegated library of 8099, 46455, 54414, 53763, 67076, 67102, 44181, 67084FL, or 67084alt variants is generated by combinatorial mutagenesis at the nucleic acid level and is encoded by a variegated gene library. A variegated library of 8099, 46455, 54414, 53763, 67076, 67102, 44181, 67084FL, or 67084alt variants can be produced by, for example, enzymatically ligating a mixture of synthetic oligonucleotides into gene sequences such that a degenerate set of potential 8099, 46455, 54414, 53763, 67076, 67102, 44181, 67084FL, or 67084alt sequences is expressible as individual polypeptides, or alternatively, as a set of larger fusion proteins (e.g., for phage display) containing the set of 8099, 46455, 54414, 53763, 67076, 67102, 44181, 67084FL, or 67084alt sequences therein. There are a variety of methods which can be used to produce libraries of potential 8099, 46455, 54414, 53763, 67076, 67102, 44181, 67084FL, or 67084alt variants from a degenerate oligonucleotide sequence. Chemical synthesis of a degenerate gene sequence can be performed in an automatic DNA synthesizer, and the synthetic gene then ligated into an appropriate expression vector. Use of a degenerate set of genes allows for the provision, in one mixture, of all of the sequences encoding the desired set of potential 8099, 46455, 54414, 53763, 67076, 67102, 44181, 67084FL, or 67084alt sequences. Methods for synthesizing degenerate oligonucleotides are known in the art (see, e.g., Narang, S. A. (1983) Tetrahedron 39:3; Itakura et al. (1984) Annu. Rev. Biochem. 53:323; Itakura et al. (1984) Science 198:1056; Ike et al. (1983) Nucleic Acid Res. 11:477.

[2863] In addition, libraries of fragments of a 8099, 46455, 54414, 53763, 67076, 67102, 44181, 67084FL, or 67084alt polypeptide coding sequence can be used to generate a variegated population of 8099, 46455, 54414, 53763, 67076, 67102, 44181, 67084FL, or 67084alt fragments for screening and subsequent selection of variants of a 8099, 46455, 54414, 53763, 67076, 67102, 44181, 67084FL, or 67084alt polypeptide. In one embodiment, a library of coding sequence fragments can be generated by treating a double stranded PCR fragment of a 8099, 46455, 54414, 53763, 67076, 67102, 44181, 67084FL, or 67084alt coding sequence with a nuclease under conditions wherein nicking occurs only about once per molecule, denaturing the double stranded DNA, renaturing the DNA to form double stranded DNA which can include sense/antisense pairs from different nicked products, removing single stranded portions from reformed duplexes by treatment with S1 nuclease, and ligating the resulting fragment library into an expression vector. By this method, an expression library can be derived which encodes N-terminal, C-terminal and internal fragments of various sizes of the 8099, 46455, 54414, 53763, 67076, 67102, 44181, 67084FL, or 67084alt polypeptide.

[2864] Several techniques are known in the art for screening gene products of combinatorial libraries made by point mutations or truncation, and for screening cDNA libraries for gene products having a selected property. Such techniques are adaptable for rapid screening of the gene libraries generated by the combinatorial mutagenesis of 8099, 46455, 54414, 53763, 67076, 67102, 44181, 67084FL, or 67084alt polypeptides. The most widely used techniques, which are amenable to high through-put analysis, for screening large gene libraries typically include cloning the gene library into replicable expression vectors, transforming appropriate cells with the resulting library of vectors, and expressing the combinatorial genes under conditions in which detection of a desired activity facilitates isolation of the vector encoding the gene whose product was detected. Recursive ensemble mutagenesis (REM), a new technique which enhances the frequency of functional mutants in the libraries, can be used in combination with the screening assays to identify 8099, 46455, 54414, 53763, 67076, 67102, 44181, 67084FL, or 67084alt variants (Arkin and Youvan (1992) Proc. Natl. Acad. Sci. USA 89:7811-7815; Delagrave et al. (1993) Protein Engineering 6(3):327-331).

[2865] In one embodiment, cell based assays can be exploited to analyze a variegated 8099, 46455, 54414, 53763, 67076, 67102, 44181, 67084FL, or 67084alt library. For example, a library of expression vectors can be transfected into a cell line, which ordinarily responds to 8099, 46455, 54414, 53763, 67076, 67102, 44181, 67084FL, or 67084alt in a particular 8099, 46455, 54414, 53763, 67076, 67102, 44181, 67084FL, or 67084alt substrate-dependent manner. The transfected cells are then contacted with 8099, 46455, 54414, 53763, 67076, 67102, 44181, 67084FL, or 67084alt and the effect of the expression of the mutant on signaling by the 8099, 46455, 54414, 53763, 67076, 67102, 44181, 67084FL, or 67084alt substrate can be detected, e.g., phospholipid transport (e.g., by measuring phospholipid levels inside the cell or its various cellular compartments, within various cellular membranes, or in the extra-cellular medium), hydrolysis of ATP, phosphorylation or dephosphorylation of the HEAT protein, and/or gene transcription. Plasmid DNA can then be recovered from the cells which score for inhibition, or alternatively, potentiation of signaling by the HEAT substrate, or which score for increased or decreased levels of phospholipid transport or ATP hydrolysis, and the individual clones further characterized.

[2866] An isolated 8099, 46455, 54414, 53763, 67076, 67102, 44181, 67084FL, or 67084alt polypeptide, or a portion or fragment thereof, can be used as an immunogen to generate antibodies that bind 8099, 46455, 54414, 53763, 67076, 67102, 44181, 67084FL, or 67084alt using standard techniques for polyclonal and monoclonal antibody preparation. A full-length 8099, 46455, 54414, 53763, 67076, 67102, 44181, 67084FL, or 67084alt polypeptide can be used or, alternatively, the invention provides antigenic peptide fragments of 8099, 46455, 54414, 53763, 67076, 67102, 44181, 67084FL, or 67084alt for use as immunogens. The antigenic peptide of 8099, 46455, 54414, 53763, 67076, 67102, 44181, 67084FL, or 67084alt comprises at least 8 amino acid residues of the amino acid sequence shown in SEQ ID NO:47, 50, 53, 56, 59, 62, 65, 68, or 71 and encompasses an epitope of 8099, 46455, 54414, 53763, 67076, 67102, 44181, 67084FL, or 67084alt such that an antibody raised against the peptide forms a specific immune complex with 8099, 46455, 54414, 53763, 67076, 67102, 44181, 67084FL, or 67084alt. Preferably, the antigenic peptide comprises at least 10 amino acid residues, more preferably at least 15 amino acid residues, even more preferably at least 20 amino acid residues, and most preferably at least 30 amino acid residues.

[2867] Preferred epitopes encompassed by the antigenic peptide are regions of 8099, 46455, 54414, 53763, 67076, 67102, 44181, 67084FL, or 67084alt that are located on the surface of the polypeptide, e.g., hydrophilic regions, as well as regions with high antigenicity (see, for example, FIGS. 45, 52, 56, 60, 64, 68, 72, 76, and 80).

[2868] A 8099, 46455, 54414, 53763, 67076, 67102, 44181, 67084FL, or 67084alt immunogen typically is used to prepare antibodies by immunizing a suitable subject, (e.g., rabbit, goat, mouse or other mammal) with the immunogen. An appropriate immunogenic preparation can contain, for example, recombinantly expressed 8099, 46455, 54414, 53763, 67076, 67102, 44181, 67084FL, or 67084alt polypeptide or a chemically synthesized 8099, 46455, 54414, 53763, 67076, 67102, 44181, 67084FL, or 67084alt polypeptide. The preparation can further include an adjuvant, such as Freund's complete or incomplete adjuvant, or similar immunostimulatory agent. Immunization of a suitable subject with an immunogenic 8099, 46455, 54414, 53763, 67076, 67102, 44181, 67084FL, or 67084alt preparation induces a polyclonal anti-8099, 46455, 54414, 53763, 67076, 67102, 44181, 67084FL, or 67084alt antibody response.

[2869] Accordingly, another aspect of the invention pertains to polyclonal anti-8099, 46455, 54414, 53763, 67076, 67102, 44181, 67084FL, or 67084alt antibodies. The term “antibody” as used herein refers to immunoglobulin molecules and immunologically active portions of immunoglobulin molecules, i.e., molecules that contain an antigen binding site which specifically binds (immunoreacts with) an antigen, such as 8099, 46455, 54414, 53763, 67076, 67102, 44181, 67084FL, or 67084alt. Examples of immunologically active portions of immunoglobulin molecules include F(ab) and F(ab′)₂ fragments which can be generated by treating the antibody with an enzyme such as pepsin. The invention provides polyclonal and monoclonal antibodies that bind 8099, 46455, 54414, 53763, 67076, 67102, 44181, 67084FL, or 67084alt. The term “monoclonal antibody” or “monoclonal antibody composition”, as used herein, refers to a population of antibody molecules that contain only one species of an antigen binding site capable of immunoreacting with a particular epitope of 8099, 46455, 54414, 53763, 67076, 67102, 44181, 67084FL, or 67084alt. A monoclonal antibody composition thus typically displays a single binding affinity for a particular 8099, 46455, 54414, 53763, 67076, 67102, 44181, 67084FL, or 67084alt polypeptide with which it immunoreacts.

[2870] Polyclonal anti-8099, 46455, 54414, 53763, 67076, 67102, 44181, 67084FL, or 67084alt antibodies can be prepared as described above by immunizing a suitable subject with a 8099, 46455, 54414, 53763, 67076, 67102, 44181, 67084FL, or 67084alt immunogen. The anti-8099, 46455, 54414, 53763, 67076, 67102, 44181, 67084FL, or 67084alt antibody titer in the immunized subject can be monitored over time by standard techniques, such as with an enzyme linked immunosorbent assay (ELISA) using immobilized 8099, 46455, 54414, 53763, 67076, 67102, 44181, 67084FL, or 67084alt. If desired, the antibody molecules directed against 8099, 46455, 54414, 53763, 67076, 67102, 44181, 67084FL, or 67084alt can be isolated from the mammal (e.g., from the blood) and further purified by well known techniques, such as protein A chromatography to obtain the IgG fraction. At an appropriate time after immunization, e.g., when the anti-8099, 46455, 54414, 53763, 67076, 67102, 44181, 67084FL, or 67084alt antibody titers are highest, antibody-producing cells can be obtained from the subject and used to prepare monoclonal antibodies by standard techniques, such as the hybridoma technique originally described by Kohler and Milstein (1975) Nature 256:495-497) (see also, Brown et al. (1981) J. Immunol. 127:539-46; Brown et al. (1980) J. Biol. Chem .255:4980-83; Yeh et al. (1976) Proc. Natl. Acad. Sci. USA 76:2927-31; and Yeh et al. (1982) Int. J. Cancer 29:269-75), the more recent human B cell hybridoma technique (Kozbor et al. (1983) Immunol Today 4:72), the EBV-hybridoma technique (Cole et al. (1985), Monoclonal Antibodies and Cancer Therapy, Alan R. Liss, Inc., pp. 77-96) or trioma techniques. The technology for producing monoclonal antibody hybridomas is well known (see generally R. H. Kenneth, in Monoclonal Antibodies: A New Dimension In Biological Analyses, Plenum Publishing Corp., New York, N.Y. (1980); E. A. Lerner (1981) Yale J. Biol. Med., 54:387-402; M. L. Gefter et al. (1977) Somatic Cell Genet. 3:231-36). Briefly, an immortal cell line (typically a myeloma) is fused to lymphocytes (typically splenocytes) from a mammal immunized with a 8099, 46455, 54414, 53763, 67076, 67102, 44181, 67084FL, or 67084alt immunogen as described above, and the culture supernatants of the resulting hybridoma cells are screened to identify a hybridoma producing a monoclonal antibody that binds 8099, 46455, 54414, 53763, 67076, 67102, 44181, 67084FL, or 67084alt.

[2871] Any of the many well known protocols used for fusing lymphocytes and immortalized cell lines can be applied for the purpose of generating an anti-8099, 46455, 54414, 53763, 67076, 67102, 44181, 67084FL, or 67084alt monoclonal antibody (see, e.g., G. Galfre et al. (1977) Nature 266:55052; Gefter et al. Somatic Cell Genet., cited supra; Lerner, Yale J. Biol. Med., cited supra; Kenneth, Monoclonal Antibodies, cited supra). Moreover, the ordinarily skilled worker will appreciate that there are many variations of such methods which also would be useful. Typically, the immortal cell line (e.g., a myeloma cell line) is derived from the same mammalian species as the lymphocytes. For example, murine hybridomas can be made by fusing lymphocytes from a mouse immunized with an immunogenic preparation of the present invention with an immortalized mouse cell line. Preferred immortal cell lines are mouse myeloma cell lines that are sensitive to culture medium containing hypoxanthine, aminopterin and thymidine (“HAT medium”). Any of a number of myeloma cell lines can be used as a fusion partner according to standard techniques, e.g., the P3-NS1/1-Ag4-1, P3-x63-Ag8.653 or Sp2/O-Ag14 myeloma lines. These myeloma lines are available from ATCC. Typically, HAT-sensitive mouse myeloma cells are fused to mouse splenocytes using polyethylene glycol (“PEG”). Hybridoma cells resulting from the fusion are then selected using HAT medium, which kills unfused and unproductively fused myeloma cells (unfused splenocytes die after several days because they are not transformed). Hybridoma cells producing a monoclonal antibody of the invention are detected by screening the hybridoma culture supernatants for antibodies that bind 8099, 46455, 54414, 53763, 67076, 67102, 44181, 67084FL, or 67084alt, e.g., using a standard ELISA assay.

[2872] Alternative to preparing monoclonal antibody-secreting hybridomas, a monoclonal anti-8099, 46455, 54414, 53763, 67076, 67102, 44181, 67084FL, or 67084alt antibody can be identified and isolated by screening a recombinant combinatorial immunoglobulin library (e.g., an antibody phage display library) with 8099, 46455, 54414, 53763, 67076, 67102, 44181, 67084FL, or 67084alt to thereby isolate immunoglobulin library members that bind 8099, 46455, 54414, 53763, 67076, 67102, 44181, 67084FL, or 67084alt. Kits for generating and screening phage display libraries are commercially available (e.g., the Pharmacia Recombinant Phage Antibody System, Catalog No. 27-9400-01; and the Stratagene SurfZAP™ Phage Display Kit, Catalog No. 240612). Additionally, examples of methods and reagents particularly amenable for use in generating and screening antibody display library can be found in, for example, Ladner et al. U.S. Pat. No. 5,223,409; Kang et al. PCT International Publication No. WO 92/18619; Dower et al. PCT International Publication No. WO 91/17271; Winter et al. PCT International Publication WO 92/20791; Markland et al. PCT International Publication No. WO 92/15679; Breitling et al. PCT International Publication WO 93/01288; McCafferty et al. PCT International Publication No. WO 92/01047; Garrard et al. PCT International Publication No. WO 92/09690; Ladner et al. PCT International Publication No. WO 90/02809; Fuchs et al. (1991) Bio/Technology 9:1370-1372; Hay et al. (1992) Hum. Antibod. Hybridomas 3:81-85; Huse et al. (1989) Science 246.1275-1281; Griffiths et al. (1993) EMBO J 12:725-734; Hawkins et al. (1992) J. Mol. Biol. 226:889-896; Clackson et al. (1991) Nature 352:624-628; Gram et al. (1992) Proc. Natl. Acad. Sci. USA 89:3576-3580; Garrard et al. (1991) Bio/Technology 9:1373-1377; Hoogenboom et al. (1991) Nuc. Acid Res. 19:4133-4137; Barbas et al. (1991) Proc. Natl. Acad. Sci. USA 88:7978-7982; and McCafferty et al. Nature (1990) 348:552-554.

[2873] Additionally, recombinant anti-8099, 46455, 54414, 53763, 67076, 67102, 44181, 67084FL, or 67084alt antibodies, such as chimeric and humanized monoclonal antibodies, comprising both human and non-human portions, which can be made using standard recombinant DNA techniques, are within the scope of the invention Such chimeric and humanized monoclonal antibodies can be produced by recombinant DNA techniques known in the art, for example using methods described in Robinson et al. International Application No. PCT/US86/02269; Akira, et al. European Patent Application 184,187; Taniguchi, M., European Patent Application 171,496; Morrison et al. European Patent Application 173,494; Neuberger et al. PCT International Publication No. WO 86/01533; Cabilly et al. U.S. Pat. No. 4,816,567; Cabilly et al. European Patent Application 125,023; Better et al. (1988) Science 240:1041-1043; Liu et al. (1987) Proc. Natl. Acad. Sci. USA 84:3439-3443; Liu et al. (1987) J. Immunol. 139:3521-3526; Sun et al. (1987) Proc. Natl. Acad. Sci. USA 84:214-218; Nishimura et al. (1987) Canc. Res. 47:999-1005; Wood et al. (1985) Nature 314:446-449; and Shaw et al. (1988) J. Natl. Cancer Inst. 80:1553-1559); Morrison, S. L. (1985) Science 229:1202-1207; Oi et al. (1986) BioTechniques 4:214; Winter U.S. Pat. No. 5,225,539; Jones et al. (1986) Nature 321:552-525; Verhoeyen et al. (1988) Science 239:1534; and Beidler et al. (1988) J. Immunol. 141:4053-4060.

[2874] An anti-8099, 46455, 54414, 53763, 67076, 67102, 44181, 67084FL, or 67084alt antibody (e.g., monoclonal antibody) can be used to isolate 8099, 46455, 54414, 53763, 67076, 67102, 44181, 67084FL, or 67084alt by standard techniques, such as affinity chromatography or immunoprecipitation. An anti-8099, 46455, 54414, 53763, 67076, 67102, 44181, 67084FL, or 67084alt antibody can facilitate the purification of natural 8099, 46455, 54414, 53763, 67076, 67102, 44181, 67084FL, or 67084alt from cells and of recombinantly produced 8099, 46455, 54414, 53763, 67076, 67102, 44181, 67084FL, or 67084alt expressed in host cells. Moreover, an anti-8099, 46455, 54414, 53763, 67076, 67102, 44181, 67084FL, or 67084alt antibody can be used to detect 8099, 46455, 54414, 53763, 67076, 67102, 44181, 67084FL, or 67084alt polypeptides (e.g., in a cellular lysate or cell supernatant) in order to evaluate the abundance and pattern of expression of the 8099, 46455, 54414, 53763, 67076, 67102, 44181, 67084FL, or 67084alt polypeptide. Anti-8099, 46455, 54414, 53763, 67076, 67102, 44181, 67084FL, or 67084alt antibodies can be used diagnostically to monitor polypeptide levels in tissue as part of a clinical testing procedure, e.g., to, for example, determine the efficacy of a given treatment regimen. Detection can be facilitated by coupling (i.e., physically linking) the antibody to a detectable substance. Examples of detectable substances include various enzymes, prosthetic groups, fluorescent materials, luminescent materials, bioluminescent materials, and radioactive materials. Examples of suitable enzymes include horseradish peroxidase, alkaline phosphatase, β-galactosidase, or acetylcholinesterase; examples of suitable prosthetic group complexes include streptavidin/biotin and avidin/biotin; examples of suitable fluorescent materials include umbelliferone, fluorescein, fluorescein isothiocyanate, rhodamine, dichlorotriazinylamine fluorescein, dansyl chloride or phycoerythrin; an example of a luminescent material includes luminol; examples of bioluminescent materials include luciferase, luciferin, and aequorin, and examples of suitable radioactive material include ¹²⁵I, ¹³¹I, ³⁵S or ³H.

[2875] III. Recombinant Expression Vectors and Host Cells

[2876] Another aspect of the invention pertains to vectors, for example recombinant expression vectors, containing a nucleic acid containing a 8099, 46455, 54414, 53763, 67076, 67102, 44181, 67084FL, or 67084alt nucleic acid molecule or vectors containing a nucleic acid molecule which encodes a 8099, 46455, 54414, 53763, 67076, 67102, 44181, 67084FL, or 67084alt polypeptide (or a portion thereof). As used herein, the term “vector” refers to a nucleic acid molecule capable of transporting another nucleic acid to which it has been linked. One type of vector is a “plasmid”, which refers to a circular double stranded DNA loop into which additional DNA segments can be ligated. Another type of vector is a viral vector, wherein additional DNA segments can be ligated into the viral genome. Certain vectors are capable of autonomous replication in a host cell into which they are introduced (e.g., bacterial vectors having a bacterial origin of replication and episomal mammalian vectors). Other vectors (e.g., non-episomal mammalian vectors) are integrated into the genome of a host cell upon introduction into the host cell, and thereby are replicated along with the host genome. Moreover, certain vectors are capable of directing the expression of genes to which they are operatively linked. Such vectors are referred to herein as “expression vectors”. In general, expression vectors of utility in recombinant DNA techniques are often in the form of plasmids. In the present specification, “plasmid” and “vector” can be used interchangeably as the plasmid is the most commonly used form of vector. However, the invention is intended to include such other forms of expression vectors, such as viral vectors (e.g., replication defective retroviruses, adenoviruses and adeno-associated viruses), which serve equivalent functions.

[2877] The recombinant expression vectors of the invention comprise a nucleic acid of the invention in a form suitable for expression of the nucleic acid in a host cell, which means that the recombinant expression vectors include one or more regulatory sequences, selected on the basis of the host cells to be used for expression, which is operatively linked to the nucleic acid sequence to be expressed. Within a recombinant expression vector, “operably linked” is intended to mean that the nucleotide sequence of interest is linked to the regulatory sequence(s) in a manner which allows for expression of the nucleotide sequence (e.g., in an in vitro transcription/translation system or in a host cell when the vector is introduced into the host cell). The term “regulatory sequence” is intended to include promoters, enhancers and other expression control elements (e.g., polyadenylation signals). Such regulatory sequences are described, for example, in Goeddel; Gene Expression Technology: Methods in Enzymology 185, Academic Press, San Diego, Calif. (1990). Regulatory sequences include those which direct constitutive expression of a nucleotide sequence in many types of host cells and those which direct expression of the nucleotide sequence only in certain host cells (e.g., tissue-specific regulatory sequences). It will be appreciated by those skilled in the art that the design of the expression vector can depend on such factors as the choice of the host cell to be transformed, the level of expression of polypeptide desired, and the like. The expression vectors of the invention can be introduced into host cells to thereby produce proteins or peptides, including fusion proteins or peptides, encoded by nucleic acids as described herein (e.g., 8099, 46455, 54414, 53763, 67076, 67102, 44181, 67084FL, or 67084alt polypeptides, mutant forms of 8099, 46455, 54414, 53763, 67076, 67102, 44181, 67084FL, or 67084alt polypeptides, fusion proteins, and the like).

[2878] Accordingly, an exemplary embodiment provides a method for producing a polypeptide, preferably a 8099, 46455, 54414, 53763, 67076, 67102, 44181, 67084FL, or 67084alt polypeptide, by culturing in a suitable medium a host cell of the invention (e.g., a mammalian host cell such as a non-human mammalian cell) containing a recombinant expression vector, such that the polypeptide is produced.

[2879] The recombinant expression vectors of the invention can be designed for expression of 8099, 46455, 54414, 53763, 67076, 67102, 44181, 67084FL, or 67084alt polypeptides in prokaryotic or eukaryotic cells. For example, 8099, 46455, 54414, 53763, 67076, 67102, 44181, 67084FL, or 67084alt polypeptides can be expressed in bacterial cells such as E. coli, insect cells (using baculovirus expression vectors) yeast cells or mammalian cells. Suitable host cells are discussed further in Goeddel, Gene Expression Technology: Methods in Enzymology 185, Academic Press, San Diego, Calif. (1990). Alternatively, the recombinant expression vector can be transcribed and translated in vitro, for example using T7 promoter regulatory sequences and T7 polymerase.

[2880] Expression of proteins in prokaryotes is most often carried out in E. coli with vectors containing constitutive or inducible promoters directing the expression of either fusion or non-fusion proteins. Fusion vectors add a number of amino acids to a protein encoded therein, usually to the amino terminus of the recombinant protein. Such fusion vectors typically serve three purposes: 1) to increase expression of recombinant protein; 2) to increase the solubility of the recombinant protein; and 3) to aid in the purification of the recombinant protein by acting as a ligand in affinity purification. Often, in fusion expression vectors, a proteolytic cleavage site is introduced at the junction of the fusion moiety and the recombinant protein to enable separation of the recombinant protein from the fusion moiety subsequent to purification of the fusion protein. Such enzymes, and their cognate recognition sequences, include Factor Xa, thrombin and enterokinase. Typical fusion expression vectors include pGEX (Pharmacia Biotech Inc; Smith, D. B. and Johnson, K. S. (1988) Gene 67:31-40), pMAL (New England Biolabs, Beverly, Mass.) and pRIT5 (Pharmacia, Piscataway, N.J.) which fuse glutathione S-transferase (GST), maltose E binding protein, or protein A, respectively, to the target recombinant protein.

[2881] Purified fusion proteins can be utilized in 8099, 46455, 54414, 53763, 67076, 67102, 44181, 67084FL, or 67084alt activity assays, (e.g., direct assays or competitive assays described in detail below), or to generate antibodies specific for 8099, 46455, 54414, 53763, 67076, 67102, 44181, 67084FL, or 67084alt polypeptides, for example. In a preferred embodiment, a 8099, 46455, 54414, 53763, 67076, 67102, 44181, 67084FL, or 67084alt fusion protein expressed in a retroviral expression vector of the present invention can be utilized to infect bone marrow cells which are subsequently transplanted into irradiated recipients. The pathology of the subject recipient is then examined after sufficient time has passed (e.g., six (6) weeks).

[2882] Examples of suitable inducible non-fusion E. coli expression vectors include pTrc (Amann et al., (1988) Gene 69:301-315) and pET 11d (Studier et al., Gene Expression Technology: Methods in Enzymology 185, Academic Press, San Diego, Calif. (1990) 60-89). Target gene expression from the pTrc vector relies on host RNA polymerase transcription from a hybrid trp-lac fusion promoter. Target gene expression from the pET 11d vector relies on transcription from a T7 gn10-lac fusion promoter mediated by a coexpressed viral RNA polymerase (T7 gn1). This viral polymerase is supplied by host strains BL21(DE3) or HMS174(DE3) from a resident prophage harboring a T7 gn1 gene under the transcriptional control of the lacUV 5 promoter.

[2883] One strategy to maximize recombinant protein expression in E coli is to express the protein in a host bacteria with an impaired capacity to proteolytically cleave the recombinant protein (Gottesman, S., Gene Expression Technology: Methods in Enzymology 185, Academic Press, San Diego, Calif. (1990) 119-128). Another strategy is to alter the nucleic acid sequence of the nucleic acid to be inserted into an expression vector so that the individual codons for each amino acid are those preferentially utilized in E. coli (Wada et al., (1992) Nucleic Acids Res. 20:2111-2118). Such alteration of nucleic acid sequences of the invention can be carried out by standard DNA synthesis techniques.

[2884] In another embodiment, the 8099, 46455, 54414, 53763, 67076, 67102, 44181, 67084FL, or 67084alt expression vector is a yeast expression vector. Examples of vectors for expression in yeast S. cerevisiae include pYepSec1 (Baldari, et al., (1987) EMBO J. 6:229-234), pMFa (Kurjan and Herskowitz, (1982) Cell 30:933-943), pJRY88 (Schultz et al., (1987) Gene 54:113-123), pYES2 (Invitrogen Corporation, San Diego, Calif.), and picZ (Invitrogen Corporation, San Diego, Calif.).

[2885] Alternatively, 8099, 46455, 54414, 53763, 67076, 67102, 44181, 67084FL, or 67084alt polypeptides can be expressed in insect cells using baculovirus expression vectors. Baculovirus vectors available for expression of proteins in cultured insect cells (e.g., Sf9 cells) include the pAc series (Smith et al. (1983) Mol. Cell Biol. 3:2156-2165) and the pVL series (Lucklow and Summers (1989) Virology 170:31-39).

[2886] In yet another embodiment, a nucleic acid of the invention is expressed in mammalian cells using a mammalian expression vector. Examples of mammalian expression vectors include pCDM8 (Seed, B. (1987) Nature 329:840) and pMT2PC (Kaufman et al. (1987) EMBO J. 6:187-195). When used in mammalian cells, the expression vector's control functions are often provided by viral regulatory elements. For example, commonly used promoters are derived from polyoma, Adenovirus 2, cytomegalovirus and Simian Virus 40. For other suitable expression systems for both prokaryotic and eukaryotic cells see chapters 16 and 17 of Sambrook, J., Fritsh, E. F., and Maniatis, T. Molecular Cloning: A Laboratory Manual. 2nd, ed., Cold Spring Harbor Laboratory, Cold Spring Harbor Laboratory Press, Cold Spring Harbor, N.Y., 1989.

[2887] In another embodiment, the recombinant mammalian expression vector is capable of directing expression of the nucleic acid preferentially in a particular cell type (e.g., tissue-specific regulatory elements are used to express the nucleic acid). Tissue-specific regulatory elements are known in the art. Non-limiting examples of suitable tissue-specific promoters include the albumin promoter (liver-specific; Pinkert et al. (1987) Genes Dev. 1:268-277), lymphoid-specific promoters (Calame and Eaton (1988) Adv. Immunol. 43:235-275), in particular promoters of T cell receptors (Winoto and Baltimore (1989) EMBO J. 8:729-733) and immunoglobulins (Banerji et al. (1983) Cell 33:729-740; Queen and Baltimore (1983) Cell 33:741-748), neuron-specific promoters (e.g., the neurofilament promoter; Byrne and Ruddle (1989) Proc. Natl. Acad. Sci. USA 86:5473-5477), pancreas-specific promoters (Edlund et al. (1985) Science 230:912-916), and mammary gland-specific promoters (e.g., milk whey promoter; U.S. Pat. No. 4,873,316 and European Application Publication No. 264,166). Developmentally-regulated promoters are also encompassed, for example the murine hox promoters (Kessel and Gruss (1990) Science 249:374-379) and the α-fetoprotein promoter (Campes and Tilghman (1989) Genes Dev. 3:537-546).

[2888] The invention further provides a recombinant expression vector comprising a DNA molecule of the invention cloned into the expression vector in an antisense orientation. That is, the DNA molecule is operatively linked to a regulatory sequence in a manner which allows for expression (by transcription of the DNA molecule) of an RNA molecule which is antisense to 8099, 46455, 54414, 53763, 67076, 67102, 44181, 67084FL, or 67084alt mRNA. Regulatory sequences operatively linked to a nucleic acid cloned in the antisense orientation can be chosen which direct the continuous expression of the antisense RNA molecule in a variety of cell types, for instance viral promoters and/or enhancers, or regulatory sequences can be chosen which direct constitutive, tissue specific or cell type specific expression of antisense RNA. The antisense expression vector can be in the form of a recombinant plasmid, phagemid or attenuated virus in which antisense nucleic acids are produced under the control of a high efficiency regulatory region, the activity of which can be determined by the cell type into which the vector is introduced. For a discussion of the regulation of gene expression using antisense genes see Weintraub, H. et al., Antisense RNA as a molecular tool for genetic analysis, Reviews—Trends in Genetics, Vol. 1(1) 1986.

[2889] Another aspect of the invention pertains to host cells into which a 8099, 46455, 54414, 53763, 67076, 67102, 44181, 67084FL, or 67084alt nucleic acid molecule of the invention is introduced, e.g., a 8099, 46455, 54414, 53763, 67076, 67102, 44181, 67084FL, or 67084alt nucleic acid molecule within a vector (e.g., a recombinant expression vector) or a 8099, 46455, 54414, 53763, 67076, 67102, 44181, 67084FL, or 67084alt nucleic acid molecule containing sequences which allow it to homologously recombine into a specific site of the host cell's genome. The terms “host cell” and “recombinant host cell” are used interchangeably herein. It is understood that such terms refer not only to the particular subject cell but to the progeny or potential progeny of such a cell. Because certain modifications may occur in succeeding generations due to either mutation or environmental influences, such progeny may not, in fact, be identical to the parent cell, but are still included within the scope of the term as used herein.

[2890] A host cell can be any prokaryotic or eukaryotic cell. For example, a 8099, 46455, 54414, 53763, 67076, 67102, 44181, 67084FL, or 67084alt polypeptide can be expressed in bacterial cells such as E. coli, insect cells, yeast or mammalian cells (such as Chinese hamster ovary cells (CHO) or COS cells). Other suitable host cells are known to those skilled in the art.

[2891] Vector DNA can be introduced into prokaryotic or eukaryotic cells via conventional transformation or transfection techniques. As used herein, the terms “transformation” and “transfection” are intended to refer to a variety of art-recognized techniques for introducing foreign nucleic acid (e.g., DNA) into a host cell, including calcium phosphate or calcium chloride co-precipitation, DEAE-dextran-mediated transfection, lipofection, or electroporation. Suitable methods for transforming or transfecting host cells can be found in Sambrook, et al. (Molecular Cloning: A Laboratory Manual. 2nd, ed., Cold Spring Harbor Laboratory, Cold Spring Harbor Laboratory Press, Cold Spring Harbor, N.Y., 1989), and other laboratory manuals.

[2892] For stable transfection of mammalian cells, it is known that, depending upon the expression vector and transfection technique used, only a small fraction of cells may integrate the foreign DNA into their genome. In order to identify and select these integrants, a gene that encodes a selectable marker (e.g., resistance to antibiotics) is generally introduced into the host cells along with the gene of interest. Preferred selectable markers include those which confer resistance to drugs, such as G418, hygromycin and methotrexate. Nucleic acid encoding a selectable marker can be introduced into a host cell on the same vector as that encoding a 8099, 46455, 54414, 53763, 67076, 67102, 44181, 67084FL, or 67084alt polypeptide or can be introduced on a separate vector. Cells stably transfected with the introduced nucleic acid can be identified by drug selection (e.g., cells that have incorporated the selectable marker gene will survive, while the other cells die).

[2893] A host cell of the invention, such as a prokaryotic or eukaryotic host cell in culture, can be used to produce (i.e., express) a 8099, 46455, 54414, 53763, 67076, 67102, 44181, 67084FL, or 67084alt polypeptide. Accordingly, the invention further provides methods for producing a 8099, 46455, 54414, 53763, 67076, 67102, 44181, 67084FL, or 67084alt polypeptide using the host cells of the invention. In one embodiment, the method comprises culturing the host cell of the invention (into which a recombinant expression vector encoding a 8099, 46455, 54414, 53763, 67076, 67102, 44181, 67084FL, or 67084alt polypeptide has been introduced) in a suitable medium such that a 8099, 46455, 54414, 53763, 67076, 67102, 44181, 67084FL, or 67084alt polypeptide is produced. In another embodiment, the method further comprises isolating a 8099, 46455, 54414, 53763, 67076, 67102, 44181, 67084FL, or 67084alt polypeptide from the medium or the host cell.

[2894] The host cells of the invention can also be used to produce non-human transgenic animals. For example, in one embodiment, a host cell of the invention is a fertilized oocyte or an embryonic stem cell into which 8099, 46455, 54414, 53763, 67076, 67102, 44181, 67084FL, or 67084alt-coding sequences have been introduced. Such host cells can then be used to create non-human transgenic animals in which exogenous 8099, 46455, 54414, 53763, 67076, 67102, 44181, 67084FL, or 67084alt sequences have been introduced into their genome or homologous recombinant animals in which endogenous 8099, 46455, 54414, 53763, 67076, 67102, 44181, 67084FL, or 67084alt sequences have been altered. Such animals are useful for studying the function and/or activity of a 8099, 46455, 54414, 53763, 67076, 67102, 44181, 67084FL, or 67084alt and for identifying and/or evaluating modulators of 8099, 46455, 54414, 53763, 67076, 67102, 44181, 67084FL, or 67084alt activity. As used herein, a “transgenic animal” is a non-human animal, preferably a mammal, more preferably a rodent such as a rat or mouse, in which one or more of the cells of the animal includes a transgene. Other examples of transgenic animals include non-human primates, sheep, dogs, cows, goats, chickens, amphibians, and the like. A transgene is exogenous DNA which is integrated into the genome of a cell from which a transgenic animal develops and which remains in the genome of the mature animal, thereby directing the expression of an encoded gene product in one or more cell types or tissues of the transgenic animal. As used herein, a “homologous recombinant animal” is a non-human animal, preferably a mammal, more preferably a mouse, in which an endogenous 8099, 46455, 54414, 53763, 67076, 67102, 44181, 67084FL, or 67084alt gene has been altered by homologous recombination between the endogenous gene and an exogenous DNA molecule introduced into a cell of the animal, e.g., an embryonic cell of the animal, prior to development of the animal.

[2895] A transgenic animal of the invention can be created by introducing a 8099, 46455, 54414, 53763, 67076, 67102, 44181, 67084FL, or 67084alt-encoding nucleic acid into the male pronuclei of a fertilized oocyte, e.g., by microinjection, retroviral infection, and allowing the oocyte to develop in a pseudopregnant female foster animal. The 8099, 46455, 54414, 53763, 67076, 67102, 44181, 67084FL, or 67084alt cDNA sequence of SEQ ID NO:46, 49, 52, 55, or 58 can be introduced as a transgene into the genome of a non-human animal. Alternatively, a nonhuman homologue of a human 8099, 46455, 54414, 53763, 67076, 67102, 44181, 67084FL, or 67084alt gene, such as a mouse or rat 8099, 46455, 54414, 53763, 67076, 67102, 44181, 67084FL, or 67084alt gene, can be used as a transgene. Alternatively, a 8099, 46455, 54414, 53763, 67076, 67102, 44181, 67084FL, or 67084alt gene homologue, such as another 8099, 46455, 54414, 53763, 67076, 67102, 44181, 67084FL, or 67084alt family member, can be isolated based on hybridization to the 8099, 46455, 54414, 53763, 67076, 67102, 44181, 67084FL, or 67084alt cDNA sequences of SEQ ID NO:46, 48, 49, 51, 52, 54, 55, 57, 58, 60, 61, 63, 64, 66, 67, 69, 70, or 72, or the DNA insert of the plasmid deposited with ATCC as Accession Number ______, ______, ______, ______, or ______ (described further in subsection I above) and used as a transgene. Intronic sequences and polyadenylation signals can also be included in the transgene to increase the efficiency of expression of the transgene. A tissue-specific regulatory sequence(s) can be operably linked to a 8099, 46455, 54414, 53763, 67076, 67102, 44181, 67084FL, or 67084alt transgene to direct expression of a 8099, 46455, 54414, 53763, 67076, 67102, 44181, 67084FL, or 67084alt polypeptide to particular cells. Methods for generating transgenic animals via embryo manipulation and microinjection, particularly animals such as mice, have become conventional in the art and are described, for example, in U.S. Pat. Nos. 4,736,866 and 4,870,009, both by Leder et al., U.S. Pat. No. 4,873,191 by Wagner et al. and in Hogan, B., Manipulating the Mouse Embryo, (Cold Spring Harbor Laboratory Press, Cold Spring Harbor, N.Y., 1986). Similar methods are used for production of other transgenic animals. A transgenic founder animal can be identified based upon the presence of a 8099, 46455, 54414, 53763, 67076, 67102, 44181, 67084FL, or 67084alt transgene in its genome and/or expression of 8099, 46455, 54414, 53763, 67076, 67102, 44181, 67084FL, or 67084alt mRNA in tissues or cells of the animals. A transgenic founder animal can then be used to breed additional animals carrying the transgene. Moreover, transgenic animals carrying a transgene encoding a 8099, 46455, 54414, 53763, 67076, 67102, 44181, 67084FL, or 67084alt polypeptide can further be bred to other transgenic animals carrying other transgenes.

[2896] To create a homologous recombinant animal, a vector is prepared which contains at least a portion of a 8099, 46455, 54414, 53763, 67076, 67102, 44181, 67084FL, or 67084alt gene into which a deletion, addition or substitution has been introduced to thereby alter, e.g., functionally disrupt, the 8099, 46455, 54414, 53763, 67076, 67102, 44181, 67084FL, or 67084alt gene. The 8099, 46455, 54414, 53763, 67076, 67102, 44181, 67084FL, or 67084alt gene can be a human gene (e.g., the cDNA of SEQ ID NO:48, 51, 54, 57, or 60), but more preferably, is a non-human homologue of a human 8099, 46455, 54414, 53763, 67076, 67102, 44181, 67084FL, or 67084alt gene (e.g., a cDNA isolated by stringent hybridization with the nucleotide sequence of SEQ ID NO:46, 49, 52, 55, or 58). For example, a mouse 8099, 46455, 54414, 53763, 67076, 67102, 44181, 67084FL, or 67084alt gene can be used to construct a homologous recombination nucleic acid molecule, e.g., a vector, suitable for altering an endogenous 8099, 46455, 54414, 53763, 67076, 67102, 44181, 67084FL, or 67084alt gene in the mouse genome. In a preferred embodiment, the homologous recombination nucleic acid molecule is designed such that, upon homologous recombination, the endogenous 8099, 46455, 54414, 53763, 67076, 67102, 44181, 67084FL, or 67084alt gene is functionally disrupted (i.e., no longer encodes a functional protein; also referred to as a “knock out” vector). Alternatively, the homologous recombination nucleic acid molecule can be designed such that, upon homologous recombination, the endogenous 8099, 46455, 54414, 53763, 67076, 67102, 44181, 67084FL, or 67084alt gene is mutated or otherwise altered but still encodes functional polypeptide (e.g., the upstream regulatory region can be altered to thereby alter the expression of the endogenous 8099, 46455, 54414, 53763, 67076, 67102, 44181, 67084FL, or 67084alt polypeptide). In the homologous recombination nucleic acid molecule, the altered portion of the 8099, 46455, 54414, 53763, 67076, 67102, 44181, 67084FL, or 67084alt gene is flanked at its 5′ and 3′ ends by additional nucleic acid sequence of the 8099, 46455, 54414, 53763, 67076, 67102, 44181, 67084FL, or 67084alt gene to allow for homologous recombination to occur between the exogenous 8099, 46455, 54414, 53763, 67076, 67102, 44181, 67084FL, or 67084alt gene carried by the homologous recombination nucleic acid molecule and an endogenous 8099, 46455, 54414, 53763, 67076, 67102, 44181, 67084FL, or 67084alt gene in a cell, e.g., an embryonic stem cell. The additional flanking 8099, 46455, 54414, 53763, 67076, 67102, 44181, 67084FL, or 67084alt nucleic acid sequence is of sufficient length for successful homologous recombination with the endogenous gene. Typically, several kilobases of flanking DNA (both at the 5′ and 3′ ends) are included in the homologous recombination nucleic acid molecule (see, e.g., Thomas, K. R. and Capecchi, M. R. (1987) Cell 51:503 for a description of homologous recombination vectors). The homologous recombination nucleic acid molecule is introduced into a cell, e.g., an embryonic stem cell line (e.g., by electroporation) and cells in which the introduced 8099, 46455, 54414, 53763, 67076, 67102, 44181, 67084FL, or 67084alt gene has homologously recombined with the endogenous 8099, 46455, 54414, 53763, 67076, 67102, 44181, 67084FL, or 67084alt gene are selected (see e.g., Li, E. et al. (1992) Cell 69:915). The selected cells can then injected into a blastocyst of an animal (e.g., a mouse) to form aggregation chimeras (see e.g., Bradley, A. in Teratocarcinomas and Embryonic Stem Cells: A Practical Approach, E. J. Robertson, ed. (IRL, Oxford, 1987) pp. 113-152). A chimeric embryo can then be implanted into a suitable pseudopregnant female foster animal and the embryo brought to term. Progeny harboring the homologously recombined DNA in their germ cells can be used to breed animals in which all cells of the animal contain the homologously recombined DNA by germline transmission of the transgene. Methods for constructing homologous recombination nucleic acid molecules, e.g., vectors, or homologous recombinant animals are described further in Bradley, A. (1991) Current Opinion in Biotechnology 2:823-829 and in PCT International Publication Nos.: WO 90/11354 by Le Mouellec et al.; WO 91/01140 by Smithies et al.; WO 92/0968 by Zijlstra et al.; and WO 93/04169 by Berns et al.

[2897] In another embodiment, transgenic non-human animals can be produced which contain selected systems which allow for regulated expression of the transgene. One example of such a system is the cre/loxP recombinase system of bacteriophage P1. For a description of the cre/loxP recombinase system, see, e.g., Lakso et al. (1992) Proc. Natl. Acad. Sci. USA 89:6232-6236. Another example of a recombinase system is the FLP recombinase system of Saccharomyces cerevisiae (O'Gorman et al. (1991) Science 251:1351-1355. If a cre/loxP recombinase system is used to regulate expression of the transgene, animals containing transgenes encoding both the Cre recombinase and a selected protein are required. Such animals can be provided through the construction of “double” transgenic animals, e.g., by mating two transgenic animals, one containing a transgene encoding a selected protein and the other containing a transgene encoding a recombinase.

[2898] Clones of the non-human transgenic animals described herein can also be produced according to the methods described in Wilmut, I. et al. (1997) Nature 385:810-813 and PCT International Publication Nos. WO 97/07668 and WO 97/07669. In brief, a cell, e.g., a somatic cell, from the transgenic animal can be isolated and induced to exit the growth cycle and enter G_{O} phase. The quiescent cell can then be fused, e.g., through the use of electrical pulses, to an enucleated oocyte from an animal of the same species from which the quiescent cell is isolated. The reconstructed oocyte is then cultured such that it develops to morula or blastocyte and then transferred to pseudopregnant female foster animal. The offspring borne of this female foster animal will be a clone of the animal from which the cell, e.g., the somatic cell, is isolated.

[2899] IV. Pharmaceutical Compositions

[2900] The 8099, 46455, 54414, 53763, 67076, 67102, 44181, 67084FL, or 67084alt nucleic acid molecules, fragments of 8099, 46455, 54414, 53763, 67076, 67102, 44181, 67084FL, or 67084alt polypeptides, anti-8099, 46455, 54414, 53763, 67076, 67102, 44181, 67084FL, or 67084alt antibodies, and or 8099, 46455, 54414, 53763, 67076, 67102, 44181, 67084FL, or 67084alt modulators, (also referred to herein as “active compounds”) of the invention can be incorporated into pharmaceutical compositions suitable for administration. Such compositions typically comprise the nucleic acid molecule, polypeptide, or antibody and a pharmaceutically acceptable carrier. As used herein the language “pharmaceutically acceptable carrier” is intended to include any and all solvents, dispersion media, coatings, antibacterial and antifungal agents, isotonic and absorption delaying agents, and the like, compatible with pharmaceutical administration. The use of such media and agents for pharmaceutically active substances is well known in the art. Except insofar as any conventional media or agent is incompatible with the active compound, use thereof in the compositions is contemplated. Supplementary active compounds can also be incorporated into the compositions.

[2901] A pharmaceutical composition of the invention is formulated to be compatible with its intended route of administration. Examples of routes of administration include parenteral, e.g., intravenous, intradermal, subcutaneous, oral (e.g., inhalation), transdermal (topical), transmucosal, and rectal administration. Solutions or suspensions used for parenteral, intradermal, or subcutaneous application can include the following components: a sterile diluent such as water for injection, saline solution, fixed oils, polyethylene glycols, glycerine, propylene glycol or other synthetic solvents; antibacterial agents such as benzyl alcohol or methyl parabens; antioxidants such as ascorbic acid or sodium bisulfite; chelating agents such as ethylenediaminetetraacetic acid; buffers such as acetates, citrates or phosphates and agents for the adjustment of tonicity such as sodium chloride or dextrose. pH can be adjusted with acids or bases, such as hydrochloric acid or sodium hydroxide. The parenteral preparation can be enclosed in ampoules, disposable syringes or multiple dose vials made of glass or plastic.

[2902] Pharmaceutical compositions suitable for injectable use include sterile aqueous solutions (where water soluble) or dispersions and sterile powders for the extemporaneous preparation of sterile injectable solutions or dispersion. For intravenous administration, suitable carriers include physiological saline, bacteriostatic water, Cremophor EL™ (BASF, Parsippany, N.J.) or phosphate buffered saline (PBS). In all cases, the composition must be sterile and should be fluid to the extent that easy syringeability exists. It must be stable under the conditions of manufacture and storage and must be preserved against the contaminating action of microorganisms such as bacteria and fungi. The carrier can be a solvent or dispersion medium containing, for example, water, ethanol, polyol (for example, glycerol, propylene glycol, and liquid polyetheylene glycol, and the like), and suitable mixtures thereof. The proper fluidity can be maintained, for example, by the use of a coating such as lecithin, by the maintenance of the required particle size in the case of dispersion and by the use of surfactants. Prevention of the action of microorganisms can be achieved by various antibacterial and antifungal agents, for example, parabens, chlorobutanol, phenol, ascorbic acid, thimerosal, and the like. In many cases, it will be preferable to include isotonic agents, for example, sugars, polyalcohols such as manitol, sorbitol, sodium chloride in the composition. Prolonged absorption of the injectable compositions can be brought about by including in the composition an agent which delays absorption, for example, aluminum monostearate and gelatin.

[2903] Sterile injectable solutions can be prepared by incorporating the active compound (e.g., a fragment of a 8099, 46455, 54414, 53763, 67076, 67102, 44181, 67084FL, or 67084alt polypeptide or an anti-8099, 46455, 54414, 53763, 67076, 67102, 44181, 67084FL, or 67084alt antibody) in the required amount in an appropriate solvent with one or a combination of ingredients enumerated above, as required, followed by filtered sterilization. Generally, dispersions are prepared by incorporating the active compound into a sterile vehicle which contains a basic dispersion medium and the required other ingredients from those enumerated above. In the case of sterile powders for the preparation of sterile injectable solutions, the preferred methods of preparation are vacuum drying and freeze-drying which yields a powder of the active ingredient plus any additional desired ingredient from a previously sterile-filtered solution thereof.

[2904] Oral compositions generally include an inert diluent or an edible carrier. They can be enclosed in gelatin capsules or compressed into tablets. For the purpose of oral therapeutic administration, the active compound can be incorporated with excipients and used in the form of tablets, troches, or capsules. Oral compositions can also be prepared using a fluid carrier for use as a mouthwash, wherein the compound in the fluid carrier is applied orally and swished and expectorated or swallowed. Pharmaceutically compatible binding agents, and/or adjuvant materials can be included as part of the composition. The tablets, pills, capsules, troches and the like can contain any of the following ingredients, or compounds of a similar nature: a binder such as microcrystalline cellulose, gum tragacanth or gelatin; an excipient such as starch or lactose, a disintegrating agent such as alginic acid, Primogel, or corn starch; a lubricant such as magnesium stearate or Sterotes; a glidant such as colloidal silicon dioxide; a sweetening agent such as sucrose or saccharin; or a flavoring agent such as peppermint, methyl salicylate, or orange flavoring.

[2905] For administration by inhalation, the compounds are delivered in the form of an aerosol spray from pressured container or dispenser which contains a suitable propellant, e.g., a gas such as carbon dioxide, or a nebulizer.

[2906] Systemic administration can also be by transmucosal or transdermal means. For transmucosal or transdermal administration, penetrants appropriate to the barrier to be permeated are used in the formulation. Such penetrants are generally known in the art, and include, for example, for transmucosal administration, detergents, bile salts, and fusidic acid derivatives. Transmucosal administration can be accomplished through the use of nasal sprays or suppositories. For transdermal administration, the active compounds are formulated into ointments, salves, gels, or creams as generally known in the art.

[2907] The compounds can also be prepared in the form of suppositories (e.g, with conventional suppository bases such as cocoa butter and other glycerides) or retention enemas for rectal delivery.

[2908] In one embodiment, the active compounds are prepared with carriers that will protect the compound against rapid elimination from the body, such as a controlled release formulation, including implants and microencapsulated delivery systems. Biodegradable, biocompatible polymers can be used, such as ethylene vinyl acetate, polyanhydrides, polyglycolic acid, collagen, polyorthoesters, and polylactic acid. Methods for preparation of such formulations will be apparent to those skilled in the art. The materials can also be obtained commercially from Alza Corporation and Nova Pharmaceuticals, Inc. Liposomal suspensions (including liposomes targeted to infected cells with monoclonal antibodies to viral antigens) can also be used as pharmaceutically acceptable carriers. These can be prepared according to methods known to those skilled in the art, for example, as described in U.S. Pat. No. 4,522,811.

[2909] It is especially advantageous to formulate oral or parenteral compositions in dosage unit form for ease of administration and uniformity of dosage. Dosage unit form as used herein refers to physically discrete units suited as unitary dosages for the subject to be treated; each unit containing a predetermined quantity of active compound calculated to produce the desired therapeutic effect in association with the required pharmaceutical carrier. The specification for the dosage unit forms of the invention are dictated by and directly dependent on the unique characteristics of the active compound and the particular therapeutic effect to be achieved, and the limitations inherent in the art of compounding such an active compound for the treatment of individuals.

[2910] Toxicity and therapeutic efficacy of such compounds can be determined by standard pharmaceutical procedures in cell cultures or experimental animals, e.g., for determining the LD50 (the dose lethal to 50% of the population) and the ED50 (the dose therapeutically effective in 50% of the population). The dose ratio between toxic and therapeutic effects is the therapeutic index and it can be expressed as the ratio LD50/ED50. Compounds which exhibit large therapeutic indices are preferred. While compounds that exhibit toxic side effects may be used, care should be taken to design a delivery system that targets such compounds to the site of affected tissue in order to minimize potential damage to uninfected cells and, thereby, reduce side effects.

[2911] The data obtained from the cell culture assays and animal studies can be used in formulating a range of dosage for use in humans. The dosage of such compounds lies preferably within a range of circulating concentrations that include the ED50 with little or no toxicity. The dosage may vary within this range depending upon the dosage form employed and the route of administration utilized. For any compound used in the method of the invention, the therapeutically effective dose can be estimated initially from cell culture assays. A dose may be formulated in animal models to achieve a circulating plasma concentration range that includes the IC50 (i.e., the concentration of the test compound which achieves a half-maximal inhibition of symptoms) as determined in cell culture. Such information can be used to more accurately determine useful doses in humans. Levels in plasma may be measured, for example, by high performance liquid chromatography.

[2912] As defined herein, a therapeutically effective amount of polypeptide (i.e., an effective dosage) ranges from about 0.001 to 30 mg/kg body weight, preferably about 0.01 to 25 mg/kg body weight, more preferably about 0.1 to 20 mg/kg body weight, and even more preferably about 1 to 10 mg/kg, 2 to 9 mg/kg, 3 to 8 mg/kg, 4 to 7 mg/kg, or 5 to 6 mg/kg body weight. The skilled artisan will appreciate that certain factors may influence the dosage required to effectively treat a subject, including but not limited to the severity of the disease or disorder, previous treatments, the general health and/or age of the subject, and other diseases present. Moreover, treatment of a subject with a therapeutically effective amount of a polypeptide or antibody can include a single treatment or, preferably, can include a series of treatments.

[2913] In a preferred example, a subject is treated with antibody or polypeptide in the range of between about 0.1 to 20 mg/kg body weight, one time per week for between about 1 to 10 weeks, preferably between 2 to 8 weeks, more preferably between about 3 to 7 weeks, and even more preferably for about 4, 5, or 6 weeks. It will also be appreciated that the effective dosage of antibody or polypeptide used for treatment may increase or decrease over the course of a particular treatment. Changes in dosage may result and become apparent from the results of diagnostic assays as described herein.

[2914] The present invention encompasses agents which modulate expression or activity. An agent may, for example, be a small molecule. For example, such small molecules include, but are not limited to, peptides, peptidomimetics, amino acids, amino acid analogs, polynucleotides, polynucleotide analogs, nucleotides, nucleotide analogs, organic or inorganic compounds (i.e.,. including heteroorganic and organometallic compounds) having a molecular weight less than about 10,000 grams per mole, organic or inorganic compounds having a molecular weight less than about 5,000 grams per mole, organic or inorganic compounds having a molecular weight less than about 1,000 grams per mole, organic or inorganic compounds having a molecular weight less than about 500 grams per mole, and salts, esters, and other pharmaceutically acceptable forms of such compounds. It is understood that appropriate doses of small molecule agents depends upon a number of factors within the ken of the ordinarily skilled physician, veterinarian, or researcher. The dose(s) of the small molecule will vary, for example, depending upon the identity, size, and condition of the subject or sample being treated, further depending upon the route by which the composition is to be administered, if applicable, and the effect which the practitioner desires the small molecule to have upon the nucleic acid or polypeptide of the invention.

[2915] Exemplary doses include milligram or microgram amounts of the small molecule per kilogram of subject or sample weight (e.g., about 1 microgram per kilogram to about 500 milligrams per kilogram, about 100 micrograms per kilogram to about 5 milligrams per kilogram, or about 1 microgram per kilogram to about 50 micrograms per kilogram. It is furthermore understood that appropriate doses of a small molecule depend upon the potency of the small molecule with respect to the expression or activity to be modulated. Such appropriate doses may be determined using the assays described herein. When one or more of these small molecules is to be administered to an animal (e.g., a human) in order to modulate expression or activity of a polypeptide or nucleic acid of the invention, a physician, veterinarian, or researcher may, for example, prescribe a relatively low dose at first, subsequently increasing the dose until an appropriate response is obtained. In addition, it is understood that the specific dose level for any particular animal subject will depend upon a variety of factors including the activity of the specific compound employed, the age, body weight, general health, gender, and diet of the subject, the time of administration, the route of administration, the rate of excretion, any drug combination, and the degree of expression or activity to be modulated.

[2916] Further, an antibody (or fragment thereof) may be conjugated to a therapeutic moiety such as a cytotoxin, a therapeutic agent or a radioactive metal ion. A cytotoxin or cytotoxic agent includes any agent that is detrimental to cells. Examples include taxol, cytochalasin B, gramicidin D, ethidium bromide, emetine, mitomycin, etoposide, tenoposide, vincristine, vinblastine, colchicin, doxorubicin, daunorubicin, dihydroxy anthracin dione, mitoxantrone, mithramycin, actinomycin D, 1-dehydrotestosterone, glucocorticoids, procaine, tetracaine, lidocaine, propranolol, and puromycin and analogs or homologues thereof. Therapeutic agents include, but are not limited to, antimetabolites (e.g., methotrexate, 6-mercaptopurine, 6-thioguanine, cytarabine, 5-fluorouracil decarbazine), alkylating agents (e.g., mechlorethamine, thioepa chlorambucil, melphalan, carmustine (BSNU) and lomustine (CCNU), cyclothosphamide, busulfan, dibromomannitol, streptozotocin, mitomycin C, and cis-dichlorodiamine platinum (II) (DDP) cisplatin), anthracyclines (e.g., daunorubicin (formerly daunomycin) and doxorubicin), antibiotics (e.g., dactinomycin (formerly actinomycin), bleomycin, mithramycin, and anthramycin (AMC)), and anti-mitotic agents (e.g., vincristine and vinblastine).

[2917] The conjugates of the invention can be used for modifying a given biological response, the drug moiety is not to be construed as limited to classical chemical therapeutic agents. For example, the drug moiety may be a protein or polypeptide possessing a desired biological activity. Such proteins may include, for example, a toxin such as abrin, ricin A, pseudomonas exotoxin, or diphtheria toxin; a protein such as tumor necrosis factor, alpha-interferon, beta-interferon, nerve growth factor, platelet derived growth factor, tissue plasminogen activator; or, biological response modifiers such as, for example, lymphokines, interleukin-1 (“IL-1”), interleukin-2 (“IL-2”), interleukin-6 (“IL-6”), granulocyte macrophage colony stimulating factor (“GM-CSF”), granulocyte colony stimulating factor (“G-CSF”), or other growth factors.

[2918] Techniques for conjugating such therapeutic moiety to antibodies are well known, see, e.g., Arnon et al., “Monoclonal Antibodies For Immunotargeting Of Drugs In Cancer Therapy”, in Monoclonal Antibodies And Cancer Therapy, Reisfeld et al. (eds.), pp. 243-56 (Alan R. Liss, Inc. 1985); Hellstrom et al., “Antibodies For Drug Delivery”, in Controlled Drug Delivery (2nd Ed.), Robinson et al. (eds.), pp. 623-53 (Marcel Dekker, Inc. 1987); Thorpe, “Antibody Carriers Of Cytotoxic Agents In Cancer Therapy: A Review”, in Monoclonal Antibodies '84: Biological And Clinical Applications, Pinchera et al. (eds.), pp. 475-506 (1985); “Analysis, Results, And Future Prospective Of The Therapeutic Use Of Radiolabeled Antibody In Cancer Therapy”, in Monoclonal Antibodies For Cancer Detection And Therapy, Baldwin et al. (eds.), pp. 303-16 (Academic Press 1985), and Thorpe et al., “The Preparation And Cytotoxic Properties Of Antibody-Toxin Conjugates”, Immunol. Rev., 62:119-58 (1982). Alternatively, an antibody can be conjugated to a second antibody to form an antibody heteroconjugate as described by Segal in U.S. Pat. No. 4,676,980.

[2919] The nucleic acid molecules of the invention can be inserted into vectors and used as gene therapy vectors. Gene therapy vectors can be delivered to a subject by, for example, intravenous injection, local administration (see U.S. Pat. No. 5,328,470) or by stereotactic injection (see e.g., Chen et al. (1994) Proc. Natl. Acad. Sci. USA 91:3054-3057). The pharmaceutical preparation of the gene therapy vector can include the gene therapy vector in an acceptable diluent, or can comprise a slow release matrix in which the gene delivery vehicle is imbedded. Alternatively, where the complete gene delivery vector can be produced intact from recombinant cells, e.g., retroviral vectors, the pharmaceutical preparation can include one or more cells which produce the gene delivery system.

[2920] The pharmaceutical compositions can be included in a container, pack, or dispenser together with instructions for administration.

[2921] V. Uses and Methods of the Invention

[2922] The nucleic acid molecules, proteins, protein homologues, antibodies, and modulators described herein can be used in one or more of the following methods: a) screening assays; b) predictive medicine (e.g., diagnostic assays, prognostic assays, monitoring clinical trials, and pharmacogenetics); and c) methods of treatment (e.g., therapeutic and prophylactic).

[2923] As described herein, an 8099 and/or 46455 polypeptide of the invention has one or more of the following activities: (1) bind a monosaccharide, e.g., D-glucose, D-fructose, D-galactose, and/or mannose, (2) transport monosaccharides across a cell membrane, (3) influence insulin and/or glucagon secretion, (4) maintain sugar homeostasis in a cell, (5) function as a neuronal transporter, and (6) mediate trans-epithelial movement in a cell.

[2924] As described herein, a 54414 and/or 53763 protein of the invention has one or more of the following activities: (i) interaction with a 54414 or 53763 substrate (e.g., a potassium ion or a cyclic nucleotide); (ii) conductance or transport of a 54414 or 53763 substrate across a cellular membrane; (iii) interaction with a second non-54414 or 53763 protein (e.g., a 54414 or 53763 polypeptide or a non-54414 or 53763 potassium channel subunit); (iv) modulation (e.g., maintenance and/or rectification) of membrane potentials; (v) regulation of target molecule availability or activity; (vi) modulation of intra- or intercellular signaling and/or gene transcription (e.g., either directly or indirectly); (viii) generation of outwardly rectifying currents; (viii) modulation of membrane excitability; (ix) modulation of the release of neurotransmitters; (x) regulation of contractility (e.g., of smooth muscle cells), secretion, and/or synaptic transmission; and/or (xi) modulation of processes which underlie learning and memory.

[2925] Preferred activities of 54414 further include at least one of the following activities: (i) interaction with maxi-K potassium channels (i.e., large conductance channels, in particular Slo); (ii) modulation of maxi-K potassium channel activity (e.g., Slo-mediated activities); (iii) generation of intermediate conductance channels; and/or (iv) regulation of contractility (e.g., of smooth muscle cells), secretion, and/or synaptic transmission, in particular, via modulation of Slo.

[2926] Preferred activities of 53763 further include at least one of the following activities:

[2927] (i) interaction with Shaker (Sh) potassium channels and/or channel subunits; (ii) modulation of Shaker (Sh) potassium channel activity (e.g., termination of prolonged membrane depolarization; (iii) modulation of high voltage activating channel activity and/or inactivating channel activity, and the like.

[2928] As described herein, a 67076, 67102, 44181, 67084FL, or 67084alt polypeptide of the invention has one or more of the following activities: (i) interaction with a 67076, 67102, 44181, 67084FL, or 67084alt substrate or target molecule (e.g., a phospholipid, ATP, or a non-67076, 67102, 44181, 67084FL, or 67084alt protein); (ii) transport of a 67076, 67102, 44181, 67084FL, or 67084alt substrate or target molecule (e.g., an aminophospholipid such as phosphatidylserine or phosphatidylethanolamine) from one side of a cellular membrane to the other; (iii) the ability to be phosphorylated or dephosphorylated; (iv) adoption of an E1 conformation or an E2 conformation; (v) conversion of a 67076, 67102, 44181, 67084FL, or 67084alt substrate or target molecule to a product (e.g., hydrolysis of ATP); (vi) interaction with a second non-67076, 67102, 44181, 67084FL, or 67084alt protein; (vii) modulation of substrate or target molecule location (e.g., modulation of phospholipid location within a cell and/or location with respect to a cellular membrane); (viii) maintenance of aminophospholipid gradients; (ix) modulation of intra- or intercellular signaling and/or gene transcription (e.g., either directly or indirectly); and/or (x) modulation of cellular proliferation, growth, differentiation, apoptosis, absorption, or secretion.

[2929] The isolated nucleic acid molecules of the invention can be used, for example, to express 8099, 46455, 54414, 53763, 67076, 67102, 44181, 67084FL, or 67084alt polypeptides (e.g., via a recombinant expression vector in a host cell in gene therapy applications), to detect 8099, 46455, 54414, 53763, 67076, 67102, 44181, 67084FL, or 67084alt mRNA (e.g., in a biological sample) or a genetic alteration in a 8099, 46455, 54414, 53763, 67076, 67102, 44181, 67084FL, or 67084alt gene, and to modulate 8099, 46455, 54414, 53763, 67076, 67102, 44181, 67084FL, or 67084alt activity, as described further below. The 8099, 46455, 54414, 53763, 67076, 67102, 44181, 67084FL, or 67084alt polypeptides can be used to treat disorders characterized by insufficient or excessive production of a 8099, 46455, 54414, 53763, 67076, 67102, 44181, 67084FL, or 67084alt substrate or production or transport of 8099, 46455, 54414, 53763, 67076, 67102, 44181, 67084FL, or 67084alt inhibitors, for example, 8099, 46455, 54414, 53763, 67076, 67102, 44181, 67084FL, or 67084alt associated disorders.

[2930] As used herein, a “sugar transporter” includes a protein or polypeptide which is involved in transporting a molecule, e.g., a monosaccharide such as D-glucose, D-fructose, D-galactose or mannose, across the plasma membrane of a cell, e.g., a liver cell, fat cell, muscle cell, or blood cell, such as an erythrocyte. Sugar transporters regulate sugar homeostasis in a cell and, typically, have sugar substrate specificity. Examples of sugar transporters include glucose transporters, fructose transporters, and galactose transporters.

[2931] As used herein, a “sugar transporter mediated activity” includes an activity which involves a sugar transporter, e.g., a sugar transporter in a liver cell, fat cell, muscle cell, or blood cell, such as an erythrocyte. Sugar transporter mediated activities include the transport of sugars, e.g., D-glucose, D-fructose, D-galactose or mannose, into and out of cells; the stimulation of molecules that regulate glucose homeostasis (e.g., insulin and glucagon), from cells, e.g., pancreatic cells; and the participation in signal transduction pathways associated with sugar metabolism.

[2932] As the 8099 and 46455 molecules of the present invention are sugar transporters, they may be useful for developing novel diagnostic and therapeutic agents for sugar transporter associated disorders. As used herein, the terms “sugar transporter associated disorder” and “8099 and 46455 disorder,” used interchangeably herein, includes a disorder, disease, or condition which is characterized by an aberrant, e.g., upregulated or downregulated, sugar transporter mediated activity. Sugar transporter associated disorders typically result in, e.g., upregulated or downregulated, sugar levels in a cell. Examples of sugar transporter associated disorders include disorders associated with sugar homeostasis, such as obesity, anorexia, type-1 diabetes, type-2 diabetes, hypoglycemia, glycogen storage disease (Von Gierke disease), type I glycogenosis, bipolar disorder, seasonal affective disorder, and cluster B personality disorders.

[2933] As used interchangeably herein, a “potassium channel associated disorder” or a “54414 or 53763 associated disorder” include a disorder, disease or condition which is caused or characterized by a misregulation (e.g., downregulation or upregulation) of 54414 or 53763 activity. 54414 or 53763 associated disorders can detrimentally affect cellular functions such as cellular proliferation, growth, differentiation, inter- or intra-cellular communication; tissue function, such as cardiac function or musculoskeletal function; systemic responses in an organism, such as nervous system responses, hormonal responses (e.g., insulin response), or immune responses; and protection of cells from toxic compounds (e.g., carcinogens, toxins, or mutagens).

[2934] In a preferred embodiment, 54414 or 53763 associated disorders include CNS disorders such as cognitive and neurodegenerative disorders, examples of which include, but are not limited to, Alzheimer's disease, dementias related to Alzheimer's disease (such as Pick's disease), Parkinson's and other Lewy diffuse body diseases, senile dementia, Huntington's disease, Gilles de la Tourette's syndrome, multiple sclerosis, amyotrophic lateral sclerosis, progressive supranuclear palsy, epilepsy, seizure disorders, and Jakob-Creutzfieldt disease; autonomic function disorders such as hypertension and sleep disorders, and neuropsychiatric disorders, such as depression, schizophrenia, schizoaffective disorder, korsakoff's psychosis, mania, anxiety disorders, or phobic disorders; learning or memory disorders, e.g., amnesia or age-related memory loss, attention deficit disorder, dysthymic disorder, major depressive disorder, mania, obsessive-compulsive disorder, psychoactive substance use disorders, anxiety, phobias, panic disorder, as well as bipolar affective disorder, e.g., severe bipolar affective (mood) disorder (BP-1), and bipolar affective neurological disorders, e.g., migraine and obesity. Further CNS-related disorders include, for example, those listed in the American Psychiatric Association's Diagnostic and Statistical manual of Mental Disorders (DSM), the most current version of which is incorporated herein by reference in its entirety.

[2935] 54414 or 53763 associated disorders also include cellular proliferation, growth, differentiation, or apoptosis disorders. Cellular proliferation, growth, differentiation, or apoptosis disorders include those disorders that affect cell proliferation, growth, differentiation, or apoptosis processes. As used herein, a “cellular proliferation, growth, differentiation, or apoptosis process” is a process by which a cell increases in number, size or content, by which a cell develops a specialized set of characteristics which differ from that of other cells, or by which a cell undergoes programmed cell death. The 54414 or 53763 molecules of the present invention may modulate cellular growth, proliferation, differentiation, or apoptosis, and may play a role in disorders characterized by aberrantly regulated growth, proliferation, differentiation, or apoptosis. Such disorders include cancer, e.g., carcinoma, sarcoma, or leukemia; tumor angiogenesis and metastasis; skeletal dysplasia; hepatic disorders; and hematopoietic and/or myeloproliferative disorders.

[2936] Further examples of 54414 or 53763 associated disorders include cardiac-related disorders. Cardiovascular system disorders in which the 54414 or 53763 molecules of the invention may be directly or indirectly involved include arteriosclerosis, ischemia reperfusion injury, restenosis, arterial inflammation, vascular wall remodeling, ventricular remodeling, rapid ventricular pacing, coronary microembolism, tachycardia, bradycardia, pressure overload, aortic bending, coronary artery ligation, vascular heart disease, atrial fibrilation, Jervell syndrome, Lange-Nielsen syndrome, long-QT syndrome, congestive heart failure, sinus node dysfunction, angina, heart failure, hypertension, atrial fibrillation, atrial flutter, dilated cardiomyopathy, idiopathic cardiomyopathy, myocardial infarction, coronary artery disease, coronary artery spasm, and arrhythmia. 54414 or 53763 associated disorders also include disorders of the musculoskeletal system such as paralysis and muscle weakness, e.g., ataxia, myotonia, and myokymia.

[2937] 54414 or 53763 associated or related disorders also include hormonal disorders, such as conditions or diseases in which the production and/or regulation of hormones in an organism is aberrant. Examples of such disorders and diseases include type I and type II diabetes mellitus, pituitary disorders (e.g., growth disorders), thyroid disorders (e.g., hypothyroidism or hyperthyroidism), and reproductive or fertility disorders (e.g., disorders which affect the organs of the reproductive system, e.g., the prostate gland, the uterus, or the vagina; disorders which involve an imbalance in the levels of a reproductive hormone in a subject; disorders affecting the ability of a subject to reproduce; and disorders affecting secondary sex characteristic development, e.g., adrenal hyperplasia).

[2938] 54414 or 53763 associated or related disorders also include immune disorders, such as autoimmune disorders or immune deficiency disorders, e.g., congenital X-linked infantile hypogammaglobulinemia, transient hypogammaglobulinemia, common variable immunodeficiency, selective IgA deficiency, chronic mucocutaneous candidiasis, or severe combined immunodeficiency.

[2939] As used interchangeably herein, a “phospholipid transporter associated disorder” or a “67076, 67102, 44181, 67084FL, or 67084alt associated disorder” includes a disorder, disease or condition which is caused or characterized by a misregulation (e.g., downregulation or upregulation) of 67076, 67102, 44181, 67084FL, or 67084alt activity. 67076, 67102, 44181, 67084FL, or 67084alt associated disorders can detrimentally affect cellular functions such as cellular proliferation, growth, differentiation, inter- or intra-cellular communication; tissue function, such as cardiac function or musculoskeletal function; systemic responses in an organism, such as nervous system responses, hormonal responses (e.g., insulin response), or immune responses; and protection of cells from toxic compounds (e.g., carcinogens, toxins, or mutagens). Examples of 67076, 67102, 44181, 67084FL, or 67084alt associated disorders include CNS disorders such as cognitive and neurodegenerative disorders, examples of which include, but are not limited to, Alzheimer's disease, dementias related to Alzheimer's disease (such as Pick's disease), Parkinson's and other Lewy diffuse body diseases, senile dementia, Huntington's disease, Gilles de la Tourette's syndrome, multiple sclerosis, amyotrophic lateral sclerosis, progressive supranuclear palsy, epilepsy, seizure disorders, and Jakob-Creutzfieldt disease; autonomic function disorders such as hypertension and sleep disorders, and neuropsychiatric disorders, such as depression, schizophrenia, schizoaffective disorder, korsakoff's psychosis, mania, anxiety disorders, or phobic disorders; learning or memory disorders, e.g., amnesia or age-related memory loss, attention deficit disorder, dysthymic disorder, major depressive disorder, mania, obsessive-compulsive disorder, psychoactive substance use disorders, anxiety, phobias, panic disorder, as well as bipolar affective disorder, e.g., severe bipolar affective (mood) disorder (BP-1), and bipolar affective neurological disorders, e.g., migraine and obesity. Further CNS-related disorders include, for example, those listed in the American Psychiatric Association's Diagnostic and Statistical manual of Mental Disorders (DSM), the most current version of which is incorporated herein by reference in its entirety.

[2940] Further examples of 67076, 67102, 44181, 67084FL, or 67084alt associated disorders include cardiac-related disorders. Cardiovascular system disorders in which the 67076, 67102, 44181, 67084FL, or 67084alt molecules of the invention may be directly or indirectly involved include arteriosclerosis, ischemia reperfusion injury, restenosis, arterial inflammation, vascular wall remodeling, ventricular remodeling, rapid ventricular pacing, coronary microembolism, tachycardia, bradycardia, pressure overload, aortic bending, coronary artery ligation, vascular heart disease, atrial fibrilation, Jervell syndrome, Lange-Nielsen syndrome, long-QT syndrome, congestive heart failure, sinus node dysfunction, angina, heart failure, hypertension, atrial fibrillation, atrial flutter, dilated cardiomyopathy, idiopathic cardiomyopathy, myocardial infarction, coronary artery disease, coronary artery spasm, and arrhythmia. 67076, 67102, 44181, 67084FL, or 67084alt associated disorders also include disorders of the musculoskeletal system such as paralysis and muscle weakness, e.g., ataxia, myotonia, and myokymia.

[2941] 67076, 67102, 44181, 67084FL, or 67084alt associated disorders also include cellular proliferation, growth, or differentiation disorders. Cellular proliferation, growth, or differentiation disorders include those disorders that affect cell proliferation, growth, or differentiation processes. As used herein, a “cellular proliferation, growth, or differentiation process” is a process by which a cell increases in number, size or content, or by which a cell develops a specialized set of characteristics which differ from that of other cells. The 67076, 67102, 44181, 67084FL, or 67084alt molecules of the present invention are involved in phospholipid transport mechanisms, which are known to be involved in cellular growth, proliferation, and differentiation processes. Thus, the 67076, 67102, 44181, 67084FL, or 67084alt molecules may modulate cellular growth, proliferation, or differentiation, and may play a role in disorders characterized by aberrantly regulated growth, proliferation, or differentiation. Such disorders include cancer, e.g., carcinoma, sarcoma, or leukemia; tumor angiogenesis and metastasis; skeletal dysplasia; hepatic disorders; and hematopoietic and/or myeloproliferative disorders.

[2942] 67076, 67102, 44181, 67084FL, or 67084alt associated or related disorders also include hormonal disorders, such as conditions or diseases in which the production and/or regulation of hormones in an organism is aberrant. Examples of such disorders and diseases include type I and type II diabetes mellitus, pituitary disorders (e.g., growth disorders), thyroid disorders (e.g., hypothyroidism or hyperthyroidism), and reproductive or fertility disorders (e.g., disorders which affect the organs of the reproductive system, e.g., the prostate gland, the uterus, or the vagina; disorders which involve an imbalance in the levels of a reproductive hormone in a subject; disorders affecting the ability of a subject to reproduce; and disorders affecting secondary sex characteristic development, e.g., adrenal hyperplasia).

[2943] 67076, 67102, 44181, 67084FL, or 67084alt associated or related disorders also include immune disorders, such as autoimmune disorders or immune deficiency disorders, e.g., congenital X-linked infantile hypogammaglobulinemia, transient hypogammaglobulinemia, common variable immunodeficiency, selective IgA deficiency, chronic mucocutaneous candidiasis, or severe combined immunodeficiency.

[2944] 8099, 46455, 54414, 53763, 67076, 67102, 44181, 67084FL, or 67084alt associated or related disorders also include disorders affecting tissues in which 8099, 46455, 54414, 53763, 67076, 67102, 44181, 67084FL, or 67084alt protein is expressed.

[2945] In addition, the 8099, 46455, 54414, 53763, 67076, 67102, 44181, 67084FL, or 67084alt polypeptides can be used to screen for naturally occurring 8099, 46455, 54414, 53763, 67076, 67102, 44181, 67084FL, or 67084alt substrates, to screen for drugs or compounds which modulate 8099, 46455, 54414, 53763, 67076, 67102, 44181, 67084FL, or 67084alt activity, as well as to treat disorders characterized by insufficient or excessive production of 8099, 46455, 54414, 53763, 67076, 67102, 44181, 67084FL, or 67084alt polypeptide or production of 8099, 46455, 54414, 53763, 67076, 67102, 44181, 67084FL, or 67084alt polypeptide forms which have decreased, aberrant or unwanted activity compared to 8099, 46455, 54414, 53763, 67076, 67102, 44181, 67084FL, or 67084alt wild type polypeptide (e.g., sugar transporter associated disorder, potassium channel associated disorders, a phospholipid transporter-associated disorders). Moreover, the anti-8099, 46455, 54414, 53763, 67076, 67102, 44181, 67084FL, or 67084alt antibodies of the invention can be used to detect and isolate 8099, 46455, 54414, 53763, 67076, 67102, 44181, 67084FL, or 67084alt polypeptides, to regulate the bioavailability of 8099, 46455, 54414, 53763, 67076, 67102, 44181, 67084FL, or 67084alt polypeptides, and modulate 8099, 46455, 54414, 53763, 67076, 67102, 44181, 67084FL, or 67084alt activity.

[2946] A. Screening Assays

[2947] The invention provides a method (also referred to herein as a “screening assay”) for identifying modulators, i e., candidate or test compounds or agents (e.g., peptides, peptidomimetics, small molecules or other drugs) which bind to 8099, 46455, 54414, 53763, 67076, 67102, 44181, 67084FL, or 67084alt polypeptides, have a stimulatory or inhibitory effect on, for example, 8099, 46455, 54414, 53763, 67076, 67102, 44181, 67084FL, or 67084alt expression or 8099, 46455, 54414, 53763, 67076, 67102, 44181, 67084FL, or 67084alt activity, or have a stimulatory or inhibitory effect on, for example, the expression or activity of a 8099, 46455, 54414, 53763, 67076, 67102, 44181, 67084FL, or 67084alt substrate.

[2948] In one embodiment, the invention provides assays for screening candidate or test compounds which are substrates of a 8099, 46455, 54414, 53763, 67076, 67102, 44181, 67084FL, or 67084alt polypeptide or polypeptide or biologically active portion thereof. In another embodiment, the invention provides assays for screening candidate or test compounds which bind to or modulate the activity of a 8099, 46455, 54414, 53763, 67076, 67102, 44181, 67084FL, or 67084alt polypeptide or polypeptide or biologically active portion thereof. The test compounds of the present invention can be obtained using any of the numerous approaches in combinatorial library methods known in the art, including: biological libraries; spatially addressable parallel solid phase or solution phase libraries; synthetic library methods requiring deconvolution; the ‘one-bead one-compound’ library method; and synthetic library methods using affinity chromatography selection. The biological library approach is limited to peptide libraries, while the other four approaches are applicable to peptide, non-peptide oligomer or small molecule libraries of compounds (Lam, K. S. (1997) Anticancer Drug Des. 12:145).

[2949] Examples of methods for the synthesis of molecular libraries can be found in the art, for example in: DeWitt et al. (1993) Proc. Natl. Acad. Sci. U.S.A. 90:6909; Erb et al. (1994) Proc. Natl. Acad. Sci. USA 91:11422; Zuckermann et al. (1994). J. Med. Chem. 37:2678; Cho et al. (1993) Science 261:1303; Carrell et al. (1994) Angew. Chem. Int. Ed. Engl. 33:2059; Carell et al. (1994) Angew. Chem. Int. Ed. Engl. 33:2061; and in Gallop et al. (1994) J. Med. Chem. 37:1233.

[2950] Libraries of compounds may be presented in solution (e.g., Houghten (1992) Biotechniques 13:412-421), or on beads (Lam (1991) Nature 354:82-84), chips (Fodor (1993) Nature 364:555-556), bacteria (Ladner U.S. Pat. No. 5,223,409), spores (Ladner U.S. Pat. No. '409), plasmids (Cull et al. (1992) Proc Natl Acad Sci USA 89:1865-1869) or on phage (Scott and Smith (1990) Science 249:386-390); (Devlin (1990) Science 249:404-406); (Cwirla et al. (1990) Proc. Natl. Acad. Sci. 87:6378-6382); (Felici (1991) J. Mol. Biol. 222:301-310); (Ladner supra.).

[2951] In one embodiment, an assay is a cell-based assay in which a cell which expresses a 8099, 46455, 54414, 53763, 67076, 67102, 44181, 67084FL, or 67084alt polypeptide or biologically active portion thereof is contacted with a test compound and the ability of the test compound to modulate 8099, 46455, 54414, 53763, 67076, 67102, 44181, 67084FL, or 67084alt activity is determined.

[2952] Determining the ability of the test compound to modulate 8099 or 46455 activity can be accomplished by monitoring, for example, intracellular or extracellular D-glucose, D-fructose, D-galactose, and/or mannose concentration, or insulin or glucagon secretion. The cell, for example, can be of mammalian origin, e.g., a liver cell, fat cell, muscle cell, or a blood cell, such as an erythrocyte.

[2953] Determining the ability of the test compound to modulate 54414 or 53763 activity can be accomplished by monitoring, for example, potassium current, neurotransmitter release, and/or membrane excitability in a cell which expresses 54414 or 53763. The cell, for example, can be of mammalian origin, e.g., a neuronal cell.

[2954] Determining the ability of the test compound to modulate 67076, 67102, 44181, 67084FL, or 67084alt activity can be accomplished by monitoring, for example, (i) interaction of 67076, 67102, 44181, 67084FL, or 67084alt with a 67076, 67102, 44181, 67084FL, or 67084alt substrate or target molecule (e.g., a phospholipid, ATP, or a non-67076, 67102, 44181, 67084FL, or 67084alt protein); (ii) transport of a 67076, 67102, 44181, 67084FL, or 67084alt substrate or target molecule (e.g., an aminophospholipid such as phosphatidylserine or phosphatidylethanolamine) from one side of a cellular membrane to the other; (iii) the ability of 67076, 67102, 44181, 67084FL, or 67084alt to be phosphorylated or dephosphorylated; (iv) adoption by 67076, 67102, 44181, 67084FL, or 67084alt of an E1 conformation or an E2 conformation; (v) conversion of a 67076, 67102, 44181, 67084FL, or 67084alt substrate or target molecule to a product (e.g., hydrolysis of ATP); (vi) interaction of 67076, 67102, 44181, 67084FL, or 67084alt with a second non-67076, 67102, 44181, 67084FL, or 67084alt protein; (vii) modulation of substrate or target molecule location (e.g., modulation of phospholipid location within a cell and/or location with respect to a cellular membrane); (viii) maintenance of aminophospholipid gradients; (ix) modulation of intra- or intercellular signaling and/or gene transcription (e.g., either directly or indirectly); and/or (x) modulation of cellular proliferation, growth, differentiation, apoptosis, absorption, and/or secretion.

[2955] The ability of the test compound to modulate 8099, 46455, 54414, 53763, 67076, 67102, 44181, 67084FL, or 67084alt binding to a substrate or to bind to 8099, 46455, 54414, 53763, 67076, 67102, 44181, 67084FL, or 67084alt can also be determined. Determining the ability of the test compound to modulate 8099, 46455, 54414, 53763, 67076, 67102, 44181, 67084FL, or 67084alt binding to a substrate can be accomplished, for example, by coupling the 8099, 46455, 54414, 53763, 67076, 67102, 44181, 67084FL, or 67084alt substrate with a radioisotope or enzymatic label such that binding of the 8099, 46455, 54414, 53763, 67076, 67102, 44181, 67084FL, or 67084alt substrate to 8099, 46455, 54414, 53763, 67076, 67102, 44181, 67084FL, or 67084alt can be determined by detecting the labeled 8099, 46455, 54414, 53763, 67076, 67102, 44181, 67084FL, or 67084alt substrate in a complex. Alternatively, 8099, 46455, 54414, 53763, 67076, 67102, 44181, 67084FL, or 67084alt could be coupled with a radioisotope or enzymatic label to monitor the ability of a test compound to modulate 8099, 46455, 54414, 53763, 67076, 67102, 44181, 67084FL, or 67084alt binding to a 8099, 46455, 54414, 53763, 67076, 67102, 44181, 67084FL, or 67084alt substrate in a complex. Determining the ability of the test compound to bind 8099, 46455, 54414, 53763, 67076, 67102, 44181, 67084FL, or 67084alt can be accomplished, for example, by coupling the 8099, 46455, 54414, 53763, 67076, 67102, 44181, 67084FL, or 67084alt substrate with a radioisotope or enzymatic label such that binding of the 8099, 46455, 54414, 53763, 67076, 67102, 44181, 67084FL, or 67084alt substrate to 8099, 46455, 54414, 53763, 67076, 67102, 44181, 67084FL, or 67084alt can be determined by detecting the labeled 8099, 46455, 54414, 53763, 67076, 67102, 44181, 67084FL, or 67084alt substrate in a complex. Alternatively, 8099, 46455, 54414, 53763, 67076, 67102, 44181, 67084FL, or 67084alt could be coupled with a radioisotope or enzymatic label to monitor the ability of a test compound to modulate 8099, 46455, 54414, 53763, 67076, 67102, 44181, 67084FL, or 67084alt binding to a 8099, 46455, 54414, 53763, 67076, 67102, 44181, 67084FL, or 67084alt substrate in a complex. Determining the ability of the test compound to bind 8099, 46455, 54414, 53763, 67076, 67102, 44181, 67084FL, or 67084alt can be accomplished, for example, by coupling the compound with a radioisotope or enzymatic label such that binding of the compound to 8099, 46455, 54414, 53763, 67076, 67102, 44181, 67084FL, or 67084alt can be determined by detecting the labeled 8099, 46455, 54414, 53763, 67076, 67102, 44181, 67084FL, or 67084alt compound in a complex. For example, compounds (e.g., 8099, 46455, 54414, 53763, 67076, 67102, 44181, 67084FL, or 67084alt substrates) can be labeled with ¹²⁵I, ³⁵S, ¹⁴C, or ³H, either directly or indirectly, and the radioisotope detected by direct counting of radioemission or by scintillation counting. Alternatively, compounds can be enzymatically labeled with, for example, horseradish peroxidase, alkaline phosphatase, or luciferase, and the enzymatic label detected by determination of conversion of an appropriate substrate to product.

[2956] It is also within the scope of this invention to determine the ability of a compound (e.g., a 8099, 46455, 54414, 53763, 67076, 67102, 44181, 67084FL, or 67084alt substrate) to interact with 8099, 46455, 54414, 53763, 67076, 67102, 44181, 67084FL, or 67084alt without the labeling of any of the interactants. For example, a microphysiometer can be used to detect the interaction of a compound with 8099, 46455, 54414, 53763, 67076, 67102, 44181, 67084FL, or 67084alt without the labeling of either the compound or the 8099, 46455, 54414, 53763, 67076, 67102, 44181, 67084FL, or 67084alt. McConnell, H. M. et al. (1992) Science 257:1906-1912. As used herein, a “microphysiometer” (e.g., Cytosensor) is an analytical instrument that measures the rate at which a cell acidifies its environment using a light-addressable potentiometric sensor (LAPS). Changes in this acidification rate can be used as an indicator of the interaction between a compound and 8099, 46455, 54414, 53763, 67076, 67102, 44181, 67084FL, or 67084alt.

[2957] In another embodiment, an assay is a cell-based assay comprising contacting a cell expressing a 8099, 46455, 54414, 53763, 67076, 67102, 44181, 67084FL, or 67084alt target molecule (e.g., a 8099, 46455, 54414, 53763, 67076, 67102, 44181, 67084FL, or 67084alt substrate) with a test compound and determining the ability of the test compound to modulate (e.g., stimulate or inhibit) the activity of the 8099, 46455, 54414, 53763, 67076, 67102, 44181, 67084FL, or 67084alt target molecule. Determining the ability of the test compound to modulate the activity of a 8099, 46455, 54414, 53763, 67076, 67102, 44181, 67084FL, or 67084alt target molecule can be accomplished, for example, by determining the cellular location of the target molecule, or by determining whether the target molecule (e.g., ATP) has been hydrolyzed.

[2958] Determining the ability of the 8099, 46455, 54414, 53763, 67076, 67102, 44181, 67084FL, or 67084alt polypeptide, or a biologically active fragment thereof, to bind to or interact with a 8099, 46455, 54414, 53763, 67076, 67102, 44181, 67084FL, or 67084alt target molecule can be accomplished by one of the methods described above for determining direct binding. In a preferred embodiment, determining the ability of the 8099, 46455, 54414, 53763, 67076, 67102, 44181, 67084FL, or 67084alt polypeptide to bind to or interact with a 8099, 46455, 54414, 53763, 67076, 67102, 44181, 67084FL, or 67084alt target molecule can be accomplished by determining the activity of the target molecule. For example, the activity of the target molecule can be determined by detecting the cellular location of target molecule, detecting catalytic/enzymatic activity of the target molecule upon an appropriate substrate, detecting induction of a metabolite of the target molecule (e.g., detecting the products of ATP hydrolysis, changes in intracellular K⁺ levels) detecting the induction of a reporter gene (comprising a target-responsive regulatory element operatively linked to a nucleic acid encoding a detectable marker, e.g., luciferase), or detecting a target-regulated cellular response (i.e., membrane excitability, or cell growth, proliferation, differentiation, or apoptosis, sugar transport).

[2959] In yet another embodiment, an assay of the present invention is a cell-free assay in which a 8099, 46455, 54414, 53763, 67076, 67102, 44181, 67084FL, or 67084alt polypeptide or biologically active portion thereof is contacted with a test compound and the ability of the test compound to bind to the 8099, 46455, 54414, 53763, 67076, 67102, 44181, 67084FL, or 67084alt polypeptide or biologically active portion thereof is determined. Preferred biologically active portions of the 8099, 46455, 54414, 53763, 67076, 67102, 44181, 67084FL, or 67084alt polypeptides to be used in assays of the present invention include fragments which participate in interactions with non-8099, 46455, 54414, 53763, 67076, 67102, 44181, 67084FL, or 67084alt 3 molecules, e.g., fragments with high surface probability scores (see, for example, FIGS. 45, 52, 56, 60, 64, 68, 72, 76, and 80). Binding of the test compound to the 8099, 46455, 54414, 53763, 67076, 67102, 44181, 67084FL, or 67084alt polypeptide can be determined either directly or indirectly as described above. In a preferred embodiment, the assay includes contacting the 8099, 46455, 54414, 53763, 67076, 67102, 44181, 67084FL, or 67084alt polypeptide or biologically active portion thereof with a known compound which binds 8099, 46455, 54414, 53763, 67076, 67102, 44181, 67084FL, or 67084alt to form an assay mixture, contacting the assay mixture with a test compound, and determining the ability of the test compound to interact with a 8099, 46455, 54414, 53763, 67076, 67102, 44181, 67084FL, or 67084alt polypeptide, wherein determining the ability of the test compound to interact with a 8099, 46455, 54414, 53763, 67076, 67102, 44181, 67084FL, or 67084alt polypeptide comprises determining the ability of the test compound to preferentially bind to 8099, 46455, 54414, 53763, 67076, 67102, 44181, 67084FL, or 67084alt or biologically active portion thereof as compared to the known compound.

[2960] In another embodiment, the assay is a cell-free assay in which a 8099, 46455, 54414, 53763, 67076, 67102, 44181, 67084FL, or 67084alt polypeptide or biologically active portion thereof is contacted with a test compound and the ability of the test compound to modulate (e.g., stimulate or inhibit) the activity of the 8099, 46455, 54414, 53763, 67076, 67102, 44181, 67084FL, or 67084alt polypeptide or biologically active portion thereof is determined. Determining the ability of the test compound to modulate the activity of a 8099, 46455, 54414, 53763, 67076, 67102, 44181, 67084FL, or 67084alt polypeptide can be accomplished, for example, by determining the ability of the 8099, 46455, 54414, 53763, 67076, 67102, 44181, 67084FL, or 67084alt polypeptide to bind to a 8099, 46455, 54414, 53763, 67076, 67102, 44181, 67084FL, or 67084alt target molecule by one of the methods described above for determining direct binding. Determining the ability of the 8099, 46455, 54414, 53763, 67076, 67102, 44181, 67084FL, or 67084alt polypeptide to bind to a 8099, 46455, 54414, 53763, 67076, 67102, 44181, 67084FL, or 67084alt target molecule can also be accomplished using a technology such as real-time Biomolecular Interaction Analysis (BIA). Sjolander, S. and Urbaniczky, C. (1991) Anal. Chem. 63:2338-2345 and Szabo et al. (1995) Curr. Opin. Struct. Biol. 5:699-705. As used herein, “BIA” is a technology for studying biospecific interactions in real time, without labeling any of the interactants (e.g., BIAcore). Changes in the optical phenomenon of surface plasmon resonance (SPR) can be used as an indication of real-time reactions between biological molecules.

[2961] In an alternative embodiment, determining the ability of the test compound to modulate the activity of a 8099, 46455, 54414, 53763, 67076, 67102, 44181, 67084FL, or 67084alt polypeptide can be accomplished by determining the ability of the 8099, 46455, 54414, 53763, 67076, 67102, 44181, 67084FL, or 67084alt polypeptide to further modulate the activity of a downstream effector of a 8099, 46455, 54414, 53763, 67076, 67102, 44181, 67084FL, or 67084alt target molecule. For example, the activity of the effector molecule on an appropriate target can be determined or the binding of the effector to an appropriate target can be determined as previously described.

[2962] In yet another embodiment, the cell-free assay involves contacting a 8099, 46455, 54414, 53763, 67076, 67102, 44181, 67084FL, or 67084alt polypeptide or biologically active portion thereof with a known compound which binds the 8099, 46455, 54414, 53763, 67076, 67102, 44181, 67084FL, or 67084alt polypeptide to form an assay mixture, contacting the assay mixture with a test compound, and determining the ability of the test compound to interact with the 8099, 46455, 54414, 53763, 67076, 67102, 44181, 67084FL, or 67084alt polypeptide, wherein determining the ability of the test compound to interact with the 8099, 46455, 54414, 53763, 67076, 67102, 44181, 67084FL, or 67084alt polypeptide comprises determining the ability of the 8099, 46455, 54414, 53763, 67076, 67102, 44181, 67084FL, or 67084alt polypeptide to preferentially bind to or modulate the activity of a 8099, 46455, 54414, 53763, 67076, 67102, 44181, 67084FL, or 67084alt target molecule.

[2963] The cell-free assays of the present invention are amenable to use of both soluble and/or membrane-bound forms of isolated proteins (e.g, 8099, 46455, 54414, 53763, 67076, 67102, 44181, 67084FL, or 67084alt proteins or biologically active portions thereof). In the case of cell-free assays in which a membrane-bound form of an isolated protein is used it may be desirable to utilize a solubilizing agent such that the membrane-bound form of the isolated protein is maintained in solution. Examples of such solubilizing agents include non-ionic detergents such as n-octylglucoside, n-dodecylglucoside, n-dodecylmaltoside, octanoyl-N-methylglucamide, decanoyl-N-methylglucamide, Triton® X-100, Triton® X-114, Thesit®, Isotridecypoly(ethylene glycol ether)ₙ, 3-[(3-cholamidopropyl)dimethylamminio]-1-propane sulfonate (CHAPS), 3-[(3-cholamidopropyl)dimethylamminio]-2-hydroxy-1-propane sulfonate (CHAPSO), or N-dodecyl=N,N-dimethyl-3-ammonio-1-propane sulfonate.

[2964] In more than one embodiment of the above assay methods of the present invention, it may be desirable to immobilize either 8099, 46455, 54414, 53763, 67076, 67102, 44181, 67084FL, or 67084alt or its target molecule to facilitate separation of complexed from uncomplexed forms of one or both of the proteins, as well as to accommodate automation of the assay. Binding of a test compound to a 8099, 46455, 54414, 53763, 67076, 67102, 44181, 67084FL, or 67084alt polypeptide, or interaction of a 8099, 46455, 54414, 53763, 67076, 67102, 44181, 67084FL, or 67084alt polypeptide with a target molecule in the presence and absence of a candidate compound, can be accomplished in any vessel suitable for containing the reactants. Examples of such vessels include microtiter plates, test tubes, and micro-centrifuge tubes. In one embodiment, a fusion protein can be provided which adds a domain that allows one or both of the proteins to be bound to a matrix. For example, glutathione-S-transferase/8099, 46455, 54414, 53763, 67076, 67102, 44181, 67084FL, or 67084alt fusion proteins or glutathione-S-transferase/target fusion proteins can be adsorbed onto glutathione sepharose beads (Sigma Chemical, St. Louis, Mo.) or glutathione derivatized micrometer plates, which are then combined with the test compound or the test compound and either the non-adsorbed target protein or 8099, 46455, 54414, 53763, 67076, 67102, 44181, 67084FL, or 67084alt polypeptide, and the mixture incubated under conditions conducive to complex formation (e.g, at physiological conditions for salt and pH). Following incubation, the beads or micrometer plate wells are washed to remove any unbound components, the matrix immobilized in the case of beads, complex determined either directly or indirectly, for example, as described above. Alternatively, the complexes can be dissociated from the matrix, and the level of 8099, 46455, 54414, 53763, 67076, 67102, 44181, 67084FL, or 67084alt binding or activity determined using standard techniques.

[2965] Other techniques for immobilizing proteins on matrices can also be used in the screening assays of the invention. For example, either a 8099, 46455, 54414, 53763, 67076, 67102, 44181, 67084FL, or 67084alt polypeptide or a 8099, 46455, 54414, 53763, 67076, 67102, 44181, 67084FL, or 67084alt target molecule can be immobilized utilizing conjugation of biotin and streptavidin. Biotinylated 8099, 46455, 54414, 53763, 67076, 67102, 44181, 67084FL, or 67084alt polypeptide, substrate, or target molecules can be prepared from biotin-NHS (N-hydroxy-succinimide) using techniques known in the art (e.g., biotinylation kit, Pierce Chemicals, Rockford, Ill.), and immobilized in the wells of streptavidin-coated 96 well plates (Pierce Chemical). Alternatively, antibodies reactive with 8099, 46455, 54414, 53763, 67076, 67102, 44181, 67084FL, or 67084alt polypeptide or target molecules but which do not interfere with binding of the 8099, 46455, 54414, 53763, 67076, 67102, 44181, 67084FL, or 67084alt polypeptide to its target molecule can be derivatized to the wells of the plate, and unbound target or 8099, 46455, 54414, 53763, 67076, 67102, 44181, 67084FL, or 67084alt polypeptide trapped in the wells by antibody conjugation. Methods for detecting such complexes, in addition to those described above for the GST-immobilized complexes, include immunodetection of complexes using antibodies reactive with the 8099, 46455, 54414, 53763, 67076, 67102, 44181, 67084FL, or 67084alt polypeptide or target molecule, as well as enzyme-linked assays which rely on detecting an enzymatic activity associated with the 8099, 46455, 54414, 53763, 67076, 67102, 44181, 67084FL, or 67084alt polypeptide or target molecule.

[2966] In another embodiment, modulators of 8099, 46455, 54414, 53763, 67076, 67102, 44181, 67084FL, or 67084alt expression are identified in a method wherein a cell is contacted with a candidate compound and the expression of 8099, 46455, 54414, 53763, 67076, 67102, 44181, 67084FL, or 67084alt mRNA or polypeptide in the cell is determined. The level of expression of 8099, 46455, 54414, 53763, 67076, 67102, 44181, 67084FL, or 67084alt mRNA or polypeptide in the presence of the candidate compound is compared to the level of expression of 8099, 46455, 54414, 53763, 67076, 67102, 44181, 67084FL, or 67084alt mRNA or polypeptide in the absence of the candidate compound. The candidate compound can then be identified as a modulator of 8099, 46455, 54414, 53763, 67076, 67102, 44181, 67084FL, or 67084alt expression based on this comparison. For example, when expression of 8099, 46455, 54414, 53763, 67076, 67102, 44181, 67084FL, or 67084alt mRNA or polypeptide is greater (statistically significantly greater) in the presence of the candidate compound than in its absence, the candidate compound is identified as a stimulator of 8099, 46455, 54414, 53763, 67076, 67102, 44181, 67084FL, or 67084alt mRNA or polypeptide expression. Alternatively, when expression of 8099, 46455, 54414, 53763, 67076, 67102, 44181, 67084FL, or 67084alt mRNA or polypeptide is less (statistically significantly less) in the presence of the candidate compound than in its absence, the candidate compound is identified as an inhibitor of 8099, 46455, 54414, 53763, 67076, 67102, 44181, 67084FL, or 67084alt mRNA or polypeptide expression. The level of 8099, 46455, 54414, 53763, 67076, 67102, 44181, 67084FL, or 67084alt mRNA or polypeptide expression in the cells can be determined by methods described herein for detecting 8099, 46455, 54414, 53763, 67076, 67102, 44181, 67084FL, or 67084alt mRNA or polypeptide.

[2967] In yet another aspect of the invention, the 8099, 46455, 54414, 53763, 67076, 67102, 44181, 67084FL, or 67084alt polypeptides can be used as “bait proteins” in a two-hybrid assay or three-hybrid assay (see, e.g., U.S. Pat. No. 5,283,317; Zervos et al. (1993) Cell 72:223-232; Madura et al. (1993) J. Biol. Chem. 268:12046-12054; Bartel et al. (1993) Biotechniques 14:920-924; Iwabuchi et al. (1993) Oncogene 8:1693-1696; and Brent WO94/10300), to identify other proteins, which bind to or interact with 8099, 46455, 54414, 53763, 67076, 67102, 44181, 67084FL, or 67084alt (“8099, 46455, 54414, 53763, 67076, 67102, 44181, 67084FL, or 67084alt-binding proteins” or “8099, 46455, 54414, 53763, 67076, 67102, 44181, 67084FL, or 67084alt-bp”) and are involved in 8099, 46455, 54414, 53763, 67076, 67102, 44181, 67084FL, or 67084alt activity. Such 8099, 46455, 54414, 53763, 67076, 67102, 44181, 67084FL, or 67084alt-binding proteins are also likely to be involved in the propagation of signals by the 8099, 46455, 54414, 53763, 67076, 67102, 44181, 67084FL, or 67084alt polypeptides or 8099, 46455, 54414, 53763, 67076, 67102, 44181, 67084FL, or 67084alt targets as, for example, downstream elements of a 8099, 46455, 54414, 53763, 67076, 67102, 44181, 67084FL, or 67084alt-mediated signaling pathway. Alternatively, such 8099, 46455, 54414, 53763, 67076, 67102, 44181, 67084FL, or 67084alt-binding proteins are likely to be 8099, 46455, 54414, 53763, 67076, 67102, 44181, 67084FL, or 67084alt inhibitors.

[2968] The two-hybrid system is based on the modular nature of most transcription factors, which consist of separable DNA-binding and activation domains. Briefly, the assay utilizes two different DNA constructs. In one construct, the gene that codes for a 8099, 46455, 54414, 53763, 67076, 67102, 44181, 67084FL, or 67084alt polypeptide is fused to a gene encoding the DNA binding domain of a known transcription factor (e.g., GAL-4). In the other construct, a DNA sequence, from a library of DNA sequences, that encodes an unidentified protein (“prey” or “sample”) is fused to a gene that codes for the activation domain of the known transcription factor. If the “bait” and the “prey” proteins are able to interact, in vivo, forming a 8099, 46455, 54414, 53763, 67076, 67102, 44181, 67084FL, or 67084alt-dependent complex, the DNA-binding and activation domains of the transcription factor are brought into close proximity. This proximity allows transcription of a reporter gene (e.g., LacZ) which is operably linked to a transcriptional regulatory site responsive to the transcription factor. Expression of the reporter gene can be detected and cell colonies containing the functional transcription factor can be isolated and used to obtain the cloned gene which encodes the protein which interacts with the 8099, 46455, 54414, 53763, 67076, 67102, 44181, 67084FL, or 67084alt polypeptide.

[2969] In another aspect, the invention pertains to a combination of two or more of the assays described herein. For example, a modulating agent can be identified using a cell-based or a cell free assay, and the ability of the agent to modulate the activity of a 8099, 46455, 54414, 53763, 67076, 67102, 44181, 67084FL, or 67084alt polypeptide can be confirmed in vivo, e.g., in an animal such as an animal model for cellular transformation and/or tumorigenesis.

[2970] This invention further pertains to novel agents identified by the above-described screening assays. Accordingly, it is within the scope of this invention to further use an agent identified as described herein in an appropriate animal model. For example, an agent identified as described herein (e.g., a 8099, 46455, 54414, 53763, 67076, 67102, 44181, 67084FL, or 67084alt modulating agent, an antisense 8099, 46455, 54414, 53763, 67076, 67102, 44181, 67084FL, or 67084alt nucleic acid molecule, a 8099, 46455, 54414, 53763, 67076, 67102, 44181, 67084FL, or 67084alt-specific antibody, or a 8099, 46455, 54414, 53763, 67076, 67102, 44181, 67084FL, or 67084alt-binding partner) can be used in an animal model to determine the efficacy, toxicity, or side effects of treatment with such an agent. Alternatively, an agent identified as described herein can be used in an animal model to determine the mechanism of action of such an agent. Furthermore, this invention pertains to uses of novel agents identified by the above-described screening assays for treatments as described herein.

[2971] B. Detection Assays

[2972] Portions or fragments of the cDNA sequences identified herein (and the corresponding complete gene sequences) can be used in numerous ways as polynucleotide reagents. For example, these sequences can be used to: (i) map their respective genes on a chromosome; and, thus, locate gene regions associated with genetic disease; (ii) identify an individual from a minute biological sample (tissue typing); and (iii) aid in forensic identification of a biological sample. These applications are described in the subsections below.

[2973] 1. Chromosome Mapping

[2974] Once the sequence (or a portion of the sequence) of a gene has been isolated, this sequence can be used to map the location of the gene on a chromosome. This process is called chromosome mapping. Accordingly, portions or fragments of the 8099, 46455, 54414, 53763, 67076, 67102, 44181, 67084FL, or 67084alt nucleotide sequences, described herein, can be used to map the location of the 8099, 46455, 54414, 53763, 67076, 67102, 44181, 67084FL, or 67084alt genes on a chromosome. The mapping of the 8099, 46455, 54414, 53763, 67076, 67102, 44181, 67084FL, or 67084alt sequences to chromosomes is an important first step in correlating these sequences with genes associated with disease.

[2975] Briefly, 8099, 46455, 54414, 53763, 67076, 67102, 44181, 67084FL, or 67084alt genes can be mapped to chromosomes by preparing PCR primers (preferably 15-25 bp in length) from the 8099, 46455, 54414, 53763, 67076, 67102, 44181, 67084FL, or 67084alt nucleotide sequences. Computer analysis of the 8099, 46455, 54414, 53763, 67076, 67102, 44181, 67084FL, or 67084alt sequences can be used to predict primers that do not span more than one exon in the genomic DNA, thus complicating the amplification process. These primers can then be used for PCR screening of somatic cell hybrids containing individual human chromosomes. Only those hybrids containing the human gene corresponding to the 8099, 46455, 54414, 53763, 67076, 67102, 44181, 67084FL, or 67084alt sequences will yield an amplified fragment.

[2976] Somatic cell hybrids are prepared by fusing somatic cells from different mammals (e.g., human and mouse cells). As hybrids of human and mouse cells grow and divide, they gradually lose human chromosomes in random order, but retain the mouse chromosomes. By using media in which mouse cells cannot grow, because they lack a particular enzyme, but human cells can, the one human chromosome that contains the gene encoding the needed enzyme, will be retained. By using various media, panels of hybrid cell lines can be established. Each cell line in a panel contains either a single human chromosome or a small number of human chromosomes, and a full set of mouse chromosomes, allowing easy mapping of individual genes to specific human chromosomes (D'Eustachio P. et al. (1983) Science 220:919-924). Somatic cell hybrids containing only fragments of human chromosomes can also be produced by using human chromosomes with translocations and deletions.

[2977] PCR mapping of somatic cell hybrids is a rapid procedure for assigning a particular sequence to a particular chromosome. Three or more sequences can be assigned per day using a single thermal cycler. Using the 8099, 46455, 54414, 53763, 67076, 67102, 44181, 67084FL, or 67084alt nucleotide sequences to design oligonucleotide primers, sublocalization can be achieved with panels of fragments from specific chromosomes. Other mapping strategies which can similarly be used to map a 8099, 46455, 54414, 53763, 67076, 67102, 44181, 67084FL, or 67084alt sequence to its chromosome include in situ hybridization (described in Fan, Y. et al. (1990) Proc. Natl. Acad. Sci. USA, 87:6223-27), pre-screening with labeled flow-sorted chromosomes, and pre-selection by hybridization to chromosome specific cDNA libraries.

[2978] Fluorescence in situ hybridization (FISH) of a DNA sequence to a metaphase chromosomal spread can further be used to provide a precise chromosomal location in one step. Chromosome spreads can be made using cells whose division has been blocked in metaphase by a chemical such as colcemid that disrupts the mitotic spindle. The chromosomes can be treated briefly with trypsin, and then stained with Giemsa. A pattern of light and dark bands develops on each chromosome, so that the chromosomes can be identified individually. The FISH technique can be used with a DNA sequence as short as 500 or 600 bases. However, clones larger than 1,000 bases have a higher likelihood of binding to a unique chromosomal location with sufficient signal intensity for simple detection. Preferably 1,000 bases, and more preferably 2,000 bases will suffice to get good results at a reasonable amount of time. For a review of this technique, see Verma et al., Human Chromosomes: A Manual of Basic Techniques (Pergamon Press, New York 1988).

[2979] Reagents for chromosome mapping can be used individually to mark a single chromosome or a single site on that chromosome, or panels of reagents can be used for marking multiple sites and/or multiple chromosomes. Reagents corresponding to noncoding regions of the genes actually are preferred for mapping purposes. Coding sequences are more likely to be conserved within gene families, thus increasing the chance of cross hybridizations during chromosomal mapping.

[2980] Once a sequence has been mapped to a precise chromosomal location, the physical position of the sequence on the chromosome can be correlated with genetic map data. (Such data are found, for example, in V. McKusick, Mendelian Inheritance in Man, available on-line through Johns Hopkins University Welch Medical Library). The relationship between a gene and a disease, mapped to the same chromosomal region, can then be identified through linkage analysis (co-inheritance of physically adjacent genes), described in, for example, Egeland, J. et al. (1987) Nature, 325:783-787.

[2981] Moreover, differences in the DNA sequences between individuals affected and unaffected with a disease associated with the 8099, 46455, 54414, 53763, 67076, 67102, 44181, 67084FL, or 67084alt gene, can be determined. If a mutation is observed in some or all of the affected individuals but not in any unaffected individuals, then the mutation is likely to be the causative agent of the particular disease. Comparison of affected and unaffected individuals generally involves first looking for structural alterations in the chromosomes, such as deletions or translocations that are visible from chromosome spreads or detectable using PCR based on that DNA sequence. Ultimately, complete sequencing of genes from several individuals can be performed to confirm the presence of a mutation and to distinguish mutations from polymorphisms.

[2982] 2. Tissue Typing

[2983] The 8099, 46455, 54414, 53763, 67076, 67102, 44181, 67084FL, or 67084alt sequences of the present invention can also be used to identify individuals from minute biological samples. The United States military, for example, is considering the use of restriction fragment length polymorphism (RFLP) for identification of its personnel. In this technique, an individual's genomic DNA is digested with one or more restriction enzymes, and probed on a Southern blot to yield unique bands for identification. This method does not suffer from the current limitations of “Dog Tags” which can be lost, switched, or stolen, making positive identification difficult. The sequences of the present invention are useful as additional DNA markers for RFLP (described in U.S. Pat. No. 5,272,057).

[2984] Furthermore, the sequences of the present invention can be used to provide an alternative technique which determines the actual base-by-base DNA sequence of selected portions of an individual's genome. Thus, the 8099, 46455, 54414, 53763, 67076, 67102, 44181, 67084FL, or 67084alt nucleotide sequences described herein can be used to prepare two PCR primers from the 5′ and 3′ ends of the sequences. These primers can then be used to amplify an individual's DNA and subsequently sequence it.

[2985] Panels of corresponding DNA sequences from individuals, prepared in this manner, can provide unique individual identifications, as each individual will have a unique set of such DNA sequences due to allelic differences. The sequences of the present invention can be used to obtain such identification sequences from individuals and from tissue. The 8099, 46455, 54414, 53763, 67076, 67102, 44181, 67084FL, or 67084alt nucleotide sequences of the invention uniquely represent portions of the human genome. Allelic variation occurs to some degree in the coding regions of these sequences, and to a greater degree in the noncoding regions. It is estimated that allelic variation between individual humans occurs with a frequency of about once per each 500 bases. Each of the sequences described herein can, to some degree, be used as a standard against which DNA from an individual can be compared for identification purposes. Because greater numbers of polymorphisms occur in the noncoding regions, fewer sequences are necessary to differentiate individuals. The noncoding sequences of SEQ ID NO:46, 49, 52, 55, 58, 61, 64, 67, or 70 can comfortably provide positive individual identification with a panel of perhaps 10 to 1,000 primers which each yield a noncoding amplified sequence of 100 bases. If predicted coding sequences, such as those in SEQ ID NO:48, 51, 54, 57, 60, 63, 66, 69, or 72 are used, a more appropriate number of primers for positive individual identification would be 500-2,000.

[2986] If a panel of reagents from 8099, 46455, 54414, 53763, 67076, 67102, 44181, 67084FL, or 67084alt nucleotide sequences described herein is used to generate a unique identification database for an individual, those same reagents can later be used to identify tissue from that individual. Using the unique identification database, positive identification of the individual, living or dead, can be made from extremely small tissue samples.

[2987] 3. Use of 8099, 46455, 54414, 53763, 67076, 67102, 44181, 67084FL, or 67084alt Sequences in Forensic Biology

[2988] DNA-based identification techniques can also be used in forensic biology. Forensic biology is a scientific field employing genetic typing of biological evidence found at a crime scene as a means for positively identifying, for example, a perpetrator of a crime. To make such an identification, PCR technology can be used to amplify DNA sequences taken from very small biological samples such as tissues, e.g., hair or skin, or body fluids, e.g., blood, saliva, or semen found at a crime scene. The amplified sequence can then be compared to a standard, thereby allowing identification of the origin of the biological sample.

[2989] The sequences of the present invention can be used to provide polynucleotide reagents, e.g., PCR primers, targeted to specific loci in the human genome, which can enhance the reliability of DNA-based forensic identifications by, for example, providing another “identification marker” (i.e. another DNA sequence that is unique to a particular individual). As mentioned above, actual base sequence information can be used for identification as an accurate alternative to patterns formed by restriction enzyme generated fragments. Sequences targeted to noncoding regions of SEQ ID NO:46, 49, 52, 55, 58, 61, 64, 67, or 70 are particularly appropriate for this use as greater numbers of polymorphisms occur in the noncoding regions, making it easier to differentiate individuals using this technique. Examples of polynucleotide reagents include the 8099, 46455, 54414, 53763, 67076, 67102, 44181, 67084FL, or 67084alt nucleotide sequences or portions thereof, e.g., fragments derived from the noncoding regions of SEQ ID NO:46, 49, 52, 55, 58, 61, 64, 67, or 70, having a length of at least 20 bases, preferably at least 30 bases.

[2990] The 8099, 46455, 54414, 53763, 67076, 67102, 44181, 67084FL, or 67084alt nucleotide sequences described herein can further be used to provide polynucleotide reagents, e.g., labeled or labelable probes which can be used in, for example, an in situ hybridization technique, to identify a specific tissue, e.g., brain tissue. This can be very useful in cases where a forensic pathologist is presented with a tissue of unknown origin. Panels of such 8099, 46455, 54414, 53763, 67076, 67102, 44181, 67084FL, or 67084alt probes can be used to identify tissue by species and/or by organ type.

[2991] In a similar fashion, these reagents, e.g., 8099, 46455, 54414, 53763, 67076, 67102, 44181, 67084FL, or 67084alt primers or probes can be used to screen tissue culture for contamination (i.e. screen for the presence of a mixture of different types of cells in a culture).

[2992] C. Predictive Medicine:

[2993] The present invention also pertains to the field of predictive medicine in which diagnostic assays, prognostic assays, and monitoring clinical trials are used for prognostic (predictive) purposes to thereby treat an individual prophylactically. Accordingly, one aspect of the present invention relates to diagnostic assays for determining 8099, 46455, 54414, 53763, 67076, 67102, 44181, 67084FL, or 67084alt polypeptide and/or nucleic acid expression as well as 8099, 46455, 54414, 53763, 67076, 67102, 44181, 67084FL, or 67084alt activity, in the context of a biological sample (e.g., blood, serum, cells, tissue) to thereby determine whether an individual is afflicted with a disease or disorder, or is at risk of developing a disorder, associated with aberrant or unwanted 8099, 46455, 54414, 53763, 67076, 67102, 44181, 67084FL, or 67084alt expression or activity. The invention also provides for prognostic (or predictive) assays for determining whether an individual is at risk of developing a disorder associated with 8099, 46455, 54414, 53763, 67076, 67102, 44181, 67084FL, or 67084alt polypeptide, nucleic acid expression or activity. For example, mutations in a 8099, 46455, 54414, 53763, 67076, 67102, 44181, 67084FL, or 67084alt gene can be assayed in a biological sample. Such assays can be used for prognostic or predictive purpose to thereby prophylactically treat an individual prior to the onset of a disorder characterized by or associated with 8099, 46455, 54414, 53763, 67076, 67102, 44181, 67084FL, or 67084alt polypeptide, nucleic acid expression or activity.

[2994] Another aspect of the invention pertains to monitoring the influence of agents (e.g., drugs, compounds) on the expression or activity of 8099, 46455, 54414, 53763, 67076, 67102, 44181, 67084FL, or 67084alt in clinical trials.

[2995] These and other agents are described in further detail in the following sections.

[2996] 1. Diagnostic Assays

[2997] An exemplary method for detecting the presence or absence of 8099, 46455, 54414, 53763, 67076, 67102, 44181, 67084FL, or 67084alt polypeptide or nucleic acid in a biological sample involves obtaining a biological sample from a test subject and contacting the biological sample with a compound or an agent capable of detecting 8099, 46455, 54414, 53763, 67076, 67102, 44181, 67084FL, or 67084alt polypeptide or nucleic acid (e.g., mRNA, or genomic DNA) that encodes 8099, 46455, 54414, 53763, 67076, 67102, 44181, 67084FL, or 67084alt polypeptide such that the presence of 8099, 46455, 54414, 53763, 67076, 67102, 44181, 67084FL, or 67084alt polypeptide or nucleic acid is detected in the biological sample. In another aspect, the present invention provides a method for detecting the presence of 8099, 46455, 54414, 53763, 67076, 67102, 44181, 67084FL, or 67084alt activity in a biological sample by contacting the biological sample with an agent capable of detecting an indicator of 8099, 46455, 54414, 53763, 67076, 67102, 44181, 67084FL, or 67084alt activity such that the presence of 8099, 46455, 54414, 53763, 67076, 67102, 44181, 67084FL, or 67084alt activity is detected in the biological sample. A preferred agent for detecting 8099, 46455, 54414, 53763, 67076, 67102, 44181, 67084FL, or 67084alt mRNA or genomic DNA is a labeled nucleic acid probe capable of hybridizing to 8099, 46455, 54414, 53763, 67076, 67102, 44181, 67084FL, or 67084alt mRNA or genomic DNA. The nucleic acid probe can be, for example, the 8099, 46455, 54414, 53763, 67076, 67102, 44181, 67084FL, or 67084alt nucleic acid set forth in SEQ ID NO:46, 48, 49, 51, 52, 54, 55, 57, 58, 60, 61, 63, 64, 66, 67, 69, 70, or 72, or the DNA insert of the plasmid deposited with ATCC as Accession Number ______, ______, ______, ______, or ______, or a portion thereof, such as an oligonucleotide of at least 15, 30, 50, 100, 250 or 500 nucleotides in length and sufficient to specifically hybridize under stringent conditions to 8099, 46455, 54414, 53763, 67076, 67102, 44181, 67084FL, or 67084alt mRNA or genomic DNA. Other suitable probes for use in the diagnostic assays of the invention are described herein.

[2998] A preferred agent for detecting 8099, 46455, 54414, 53763, 67076, 67102, 44181, 67084FL, or 67084alt polypeptide is an antibody capable of binding to 8099, 46455, 54414, 53763, 67076, 67102, 44181, 67084FL, or 67084alt polypeptide, preferably an antibody with a detectable label. Antibodies can be polyclonal, or more preferably, monoclonal. An intact antibody, or a fragment thereof (e.g., Fab or F(ab′)₂) can be used. The term “labeled”, with regard to the probe or antibody, is intended to encompass direct labeling of the probe or antibody by coupling (i.e., physically linking) a detectable substance to the probe or antibody, as well as indirect labeling of the probe or antibody by reactivity with another reagent that is directly labeled. Examples of indirect labeling include detection of a primary antibody using a fluorescently labeled secondary antibody and end-labeling of a DNA probe with biotin such that it can be detected with fluorescently labeled streptavidin. The term “biological sample” is intended to include tissues, cells and biological fluids isolated from a subject, as well as tissues, cells and fluids present within a subject. That is, the detection method of the invention can be used to detect 8099, 46455, 54414, 53763, 67076, 67102, 44181, 67084FL, or 67084alt mRNA, polypeptide, or genomic DNA in a biological sample in vitro as well as in vivo. For example, in vitro techniques for detection of 8099, 46455, 54414, 53763, 67076, 67102, 44181, 67084FL, or 67084alt mRNA include Northern hybridizations and in situ hybridizations. In vitro techniques for detection of 8099, 46455, 54414, 53763, 67076, 67102, 44181, 67084FL, or 67084alt polypeptide include enzyme linked immunosorbent assays (ELISAs), Western blots, immunoprecipitations and immunofluorescence. In vitro techniques for detection of 8099, 46455, 54414, 53763, 67076, 67102, 44181, 67084FL, or 67084alt genomic DNA include Southern hybridizations. Furthermore, in vivo techniques for detection of PLTR polypeptide include introducing into a subject a labeled 8099, 46455, 54414, 53763, 67076, 67102, 44181, 67084FL, or 67084alt antibody. For example, the antibody can be labeled with a radioactive marker whose presence and location in a subject can be detected by standard imaging techniques.

[2999] The present invention also provides diagnostic assays for identifying the presence or absence of a genetic alteration characterized by at least one of (i) aberrant modification or mutation of a gene encoding a 8099, 46455, 54414, 53763, 67076, 67102, 44181, 67084FL, or 67084alt polypeptide; (ii) aberrant expression of a gene encoding a 8099, 46455, 54414, 53763, 67076, 67102, 44181, 67084FL, or 67084alt polypeptide; (iii) mis-regulation of the gene; and (iii) aberrant post-translational modification of a 8099, 46455, 54414, 53763, 67076, 67102, 44181, 67084FL, or 67084alt polypeptide, wherein a wild-type form of the gene encodes a polypeptide with a 8099, 46455, 54414, 53763, 67076, 67102, 44181, 67084FL, or 67084alt activity. “Misexpression or aberrant expression”, as used herein, refers to a non-wild type pattern of gene expression, at the RNA or protein level. It includes, but is not limited to, expression at non-wild type levels (e.g., over or under expression); a pattern of expression that differs from wild type in terms of the time or stage at which the gene is expressed (e.g., increased or decreased expression (as compared with wild type) at a predetermined developmental period or stage); a pattern of expression that differs from wild type in terms of decreased expression (as compared with wild type) in a predetermined cell type or tissue type; a pattern of expression that differs from wild type in terms of the splicing size, amino acid sequence, post-transitional modification, or biological activity of the expressed polypeptide; a pattern of expression that differs from wild type in terms of the effect of an environmental stimulus or extracellular stimulus on expression of the gene (e.g., a pattern of increased or decreased expression (as compared with wild type) in the presence of an increase or decrease in the strength of the stimulus).

[3000] In one embodiment, the biological sample contains protein molecules from the test subject. Alternatively, the biological sample can contain mRNA molecules from the test subject or genomic DNA molecules from the test subject. A preferred biological sample is a serum sample isolated by conventional means from a subject.

[3001] In another embodiment, the methods further involve obtaining a control biological sample from a control subject, contacting the control sample with a compound or agent capable of detecting 8099, 46455, 54414, 53763, 67076, 67102, 44181, 67084FL, or 67084alt polypeptide, mRNA, or genomic DNA, such that the presence of 8099, 46455, 54414, 53763, 67076, 67102, 44181, 67084FL, or 67084alt polypeptide, mRNA or genomic DNA is detected in the biological sample, and comparing the presence of 8099, 46455, 54414, 53763, 67076, 67102, 44181, 67084FL, or 67084alt polypeptide, mRNA or genomic DNA in the control sample with the presence of 8099, 46455, 54414, 53763, 67076, 67102, 44181, 67084FL, or 67084alt polypeptide, mRNA or genomic DNA in the test sample.

[3002] The invention also encompasses kits for detecting the presence of 8099, 46455, 54414, 53763, 67076, 67102, 44181, 67084FL, or 67084alt in a biological sample. For example, the kit can comprise a labeled compound or agent capable of detecting 8099, 46455, 54414, 53763, 67076, 67102, 44181, 67084FL, or 67084alt polypeptide or mRNA in a biological sample; means for determining the amount of 8099, 46455, 54414, 53763, 67076, 67102, 44181, 67084FL, or 67084alt in the sample; and means for comparing the amount of 8099, 46455, 54414, 53763, 67076, 67102, 44181, 67084FL, or 67084alt in the sample with a standard. The compound or agent can be packaged in a suitable container. The kit can further comprise instructions for using the kit to detect 8099, 46455, 54414, 53763, 67076, 67102, 44181, 67084FL, or 67084alt polypeptide or nucleic acid.

[3003] 2. Prognostic Assays

[3004] The diagnostic methods described herein can furthermore be utilized to identify subjects having or at risk of developing a disease or disorder associated with aberrant or unwanted 8099, 46455, 54414, 53763, 67076, 67102, 44181, 67084FL, or 67084alt expression or activity. As used herein, the term “aberrant” includes a 8099, 46455, 54414, 53763, 67076, 67102, 44181, 67084FL, or 67084alt expression or activity which deviates from the wild type 8099, 46455, 54414, 53763, 67076, 67102, 44181, 67084FL, or 67084alt expression or activity. Aberrant expression or activity includes increased or decreased expression or activity, as well as expression or activity which does not follow the wild type developmental pattern of expression or the subcellular pattern of expression. For example, aberrant 8099, 46455, 54414, 53763, 67076, 67102, 44181, 67084FL, or 67084alt expression or activity is intended to include the cases in which a mutation in the 8099, 46455, 54414, 53763, 67076, 67102, 44181, 67084FL, or 67084alt gene causes the 8099, 46455, 54414, 53763, 67076, 67102, 44181, 67084FL, or 67084alt gene to be under-expressed or over-expressed and situations in which such mutations result in a non-functional 8099, 46455, 54414, 53763, 67076, 67102, 44181, 67084FL, or 67084alt polypeptide or a polypeptide which does not function in a wild-type fashion, e.g., a protein which does not interact with or transport a 8099, 46455, 54414, 53763, 67076, 67102, 44181, 67084FL, or 67084alt substrate, or one which interacts with or transports a non-8099, 46455, 54414, 53763, 67076, 67102, 44181, 67084FL, or 67084alt substrate. As used herein, the term “unwanted” includes an unwanted phenomenon involved in a biological response such as deregulated cellular proliferation. For example, the term unwanted includes a 8099, 46455, 54414, 53763, 67076, 67102, 44181, 67084FL, or 67084alt expression or activity which is undesirable in a subject.

[3005] The assays described herein, such as the preceding diagnostic assays or the following assays, can be utilized to identify a subject having or at risk of developing a disorder associated with a misregulation in 8099, 46455, 54414, 53763, 67076, 67102, 44181, 67084FL, or 67084alt polypeptide activity or nucleic acid expression, such as a as a cell growth, proliferation and/or differentiation disorder. Alternatively, the prognostic assays can be utilized to identify a subject having or at risk for developing a disorder associated with a misregulation in 8099, 46455, 54414, 53763, 67076, 67102, 44181, 67084FL, or 67084alt polypeptide activity or nucleic acid expression, such as a cell growth, proliferation and/or differentiation disorder, a sugar transporter associated disorder, or a potassium channel associated disorder, as described herein. Thus, the present invention provides a method for identifying a disease or disorder associated with aberrant or unwanted 8099, 46455, 54414, 53763, 67076, 67102, 44181, 67084FL, or 67084alt expression or activity in which a test sample is obtained from a subject and 8099, 46455, 54414, 53763, 67076, 67102, 44181, 67084FL, or 67084alt polypeptide or nucleic acid (e.g., mRNA or genomic DNA) is detected, wherein the presence of 8099, 46455, 54414, 53763, 67076, 67102, 44181, 67084FL, or 67084alt polypeptide or nucleic acid is diagnostic for a subject having or at risk of developing a disease or disorder associated with aberrant or unwanted 8099, 46455, 54414, 53763, 67076, 67102, 44181, 67084FL, or 67084alt expression or activity. As used herein, a “test sample” refers to a biological sample obtained from a subject of interest. For example, a test sample can be a biological fluid (e.g., serum), cell sample, or tissue.

[3006] Furthermore, the prognostic assays described herein can be used to determine whether a subject can be administered an agent (e.g., an agonist, antagonist, peptidomimetic, protein, peptide, nucleic acid, small molecule, or other drug candidate) to treat a disease or disorder associated with aberrant or unwanted 8099, 46455, 54414, 53763, 67076, 67102, 44181, 67084FL, or 67084alt expression or activity. For example, such methods can be used to determine whether a subject can be effectively treated with an agent for a sugar transporter-associated disorder, a potassium channel associated disorder, or phospholipid transporter-associated disorder. Thus, the present invention provides methods for determining whether a subject can be effectively treated with an agent for a disorder associated with aberrant or unwanted 8099, 46455, 54414, 53763, 67076, 67102, 44181, 67084FL, or 67084alt expression or activity in which a test sample is obtained and 8099, 46455, 54414, 53763, 67076, 67102, 44181, 67084FL, or 67084alt polypeptide or nucleic acid expression or activity is detected (e.g., wherein the abundance of 8099, 46455, 54414, 53763, 67076, 67102, 44181, 67084FL, or 67084alt polypeptide or nucleic acid expression or activity is diagnostic for a subject that can be administered the agent to treat a disorder associated with aberrant or unwanted 8099, 46455, 54414, 53763, 67076, 67102, 44181, 67084FL, or 67084alt expression or activity).

[3007] The methods of the invention can also be used to detect genetic alterations in a 8099, 46455, 54414, 53763, 67076, 67102, 44181, 67084FL, or 67084alt gene, thereby determining if a subject with the altered gene is at risk for a disorder characterized by misregulation in 8099, 46455, 54414, 53763, 67076, 67102, 44181, 67084FL, or 67084alt polypeptide activity or nucleic acid expression, such as a cell growth, proliferation and/or differentiation disorder. In preferred embodiments, the methods include detecting, in a sample of cells from the subject, the presence or absence of a genetic alteration characterized by at least one of an alteration affecting the integrity of a gene encoding a 8099, 46455, 54414, 53763, 67076, 67102, 44181, 67084FL, or 67084alt-polypeptide, or the mis-expression of the 8099, 46455, 54414, 53763, 67076, 67102, 44181, 67084FL, or 67084alt gene. For example, such genetic alterations can be detected by ascertaining the existence of at least one of 1) a deletion of one or more nucleotides from a 8099, 46455, 54414, 53763, 67076, 67102, 44181, 67084FL, or 67084alt gene; 2) an addition of one or more nucleotides to a 8099, 46455, 54414, 53763, 67076, 67102, 44181, 67084FL, or 67084alt gene; 3) a substitution of one or more nucleotides of a 8099, 46455, 54414, 53763, 67076, 67102, 44181, 67084FL, or 67084alt gene, 4) a chromosomal rearrangement of a 8099, 46455, 54414, 53763, 67076, 67102, 44181, 67084FL, or 67084alt gene; 5) an alteration in the level of a messenger RNA transcript of a 8099, 46455, 54414, 53763, 67076, 67102, 44181, 67084FL, or 67084alt gene, 6) aberrant modification of a 8099, 46455, 54414, 53763, 67076, 67102, 44181, 67084FL, or 67084alt gene, such as of the methylation pattern of the genomic DNA, 7) the presence of a non-wild type splicing pattern of a messenger RNA transcript of a 8099, 46455, 54414, 53763, 67076, 67102, 44181, 67084FL, or 67084alt gene, 8) a non-wild type level of a 8099, 46455, 54414, 53763, 67076, 67102, 44181, 67084FL, or 67084alt-polypeptide, 9) allelic loss of a 8099, 46455, 54414, 53763, 67076, 67102, 44181, 67084FL, or 67084alt gene, and 10) inappropriate post-translational modification of a 8099, 46455, 54414, 53763, 67076, 67102, 44181, 67084FL, or 67084alt-polypeptide. As described herein, there are a large number of assays known in the art which can be used for detecting alterations in a 8099, 46455, 54414, 53763, 67076, 67102, 44181, 67084FL, or 67084alt gene. A preferred biological sample is a tissue or serum sample isolated by conventional means from a subject.

[3008] In certain embodiments, detection of the alteration involves the use of a probe/primer in a polymerase chain reaction (PCR) (see, e.g., U.S. Pat. Nos. 4,683,195 and 4,683,202), such as anchor PCR or RACE PCR, or, alternatively, in a ligation chain reaction (LCR) (see, e.g., Landegran et al. (1988) Science 241:1077-1080; and Nakazawa et al. (1994) Proc. Natl. Acad. Sci. USA 91:360-364), the latter of which can be particularly useful for detecting point mutations in the 8099, 46455, 54414, 53763, 67076, 67102, 44181, 67084FL, or 67084alt gene (see Abravaya et al. (1995) Nucleic Acids Res. 23:675-682). This method can include the steps of collecting a sample of cells from a subject, isolating nucleic acid (e.g., genomic, mRNA or both) from the cells of the sample, contacting the nucleic acid sample with one or more primers which specifically hybridize to a 8099, 46455, 54414, 53763, 67076, 67102, 44181, 67084FL, or 67084alt gene under conditions such that hybridization and amplification of the 8099, 46455, 54414, 53763, 67076, 67102, 44181, 67084FL, or 67084alt gene (if present) occurs, and detecting the presence or absence of an amplification product, or detecting the size of the amplification product and comparing the length to a control sample. It is anticipated that PCR and/or LCR may be desirable to use as a preliminary amplification step in conjunction with any of the techniques used for detecting mutations described herein.

[3009] Alternative amplification methods include: self sustained sequence replication (Guatelli, J. C. et al., (1990) Proc. Natl. Acad. Sci. USA 87:1874-1878), transcriptional amplification system (Kwoh, D. Y. et al., (1989) Proc. Natl. Acad Sci. USA 86:1173-1177), Q-Beta Replicase (Lizardi, P. M. et al. (1988) Bio-Technology 6:1197), or any other nucleic acid amplification method, followed by the detection of the amplified molecules using techniques well known to those of skill in the art. These detection schemes are especially useful for the detection of nucleic acid molecules if such molecules are present in very low numbers.

[3010] In an alternative embodiment, mutations in a 8099, 46455, 54414, 53763, 67076, 67102, 44181, 67084FL, or 67084alt gene from a sample cell can be identified by alterations in restriction enzyme cleavage patterns. For example, sample and control DNA is isolated, amplified (optionally), digested with one or more restriction endonucleases, and fragment length sizes are determined by gel electrophoresis and compared. Differences in fragment length sizes between sample and control DNA indicates mutations in the sample DNA. Moreover, the use of sequence specific ribozymes (see, for example, U.S. Pat. No. 5,498,531) can be used to score for the presence of specific mutations by development or loss of a ribozyme cleavage site.

[3011] In other embodiments, genetic mutations in 8099, 46455, 54414, 53763, 67076, 67102, 44181, 67084FL, or 67084alt can be identified by hybridizing a sample and control nucleic acids, e.g., DNA or RNA, to high density arrays containing hundreds or thousands of oligonucleotides probes (Cronin, M. T. et al. (1996) Human Mutation 7: 244-255; Kozal, M. J. et al. (1996) Nature Medicine 2: 753-759). For example, genetic mutations in 8099, 46455, 54414, 53763, 67076, 67102, 44181, 67084FL, or 67084alt can be identified in two dimensional arrays containing light-generated DNA probes as described in Cronin, M. T. et al. supra. Briefly, a first hybridization array of probes can be used to scan through long stretches of DNA in a sample and control to identify base changes between the sequences by making linear arrays of sequential overlapping probes. This step allows the identification of point mutations. This step is followed by a second hybridization array that allows the characterization of specific mutations by using smaller, specialized probe arrays complementary to all variants or mutations detected. Each mutation array is composed of parallel probe sets, one complementary to the wild-type gene and the other complementary to the mutant gene.

[3012] In yet another embodiment, any of a variety of sequencing reactions known in the art can be used to directly sequence the 8099, 46455, 54414, 53763, 67076, 67102, 44181, 67084FL, or 67084alt gene and detect mutations by comparing the sequence of the sample 8099, 46455, 54414, 53763, 67076, 67102, 44181, 67084FL, or 67084alt with the corresponding wild-type (control) sequence. Examples of sequencing reactions include those based on techniques developed by Maxam and Gilbert ((1977) Proc. Natl. Acad. Sci. USA 74:560) or Sanger ((1977) Proc. Natl. Acad. Sci. USA 74:5463). It is also contemplated that any of a variety of automated sequencing procedures can be utilized when performing the diagnostic assays ((1995) Biotechniques 19:448), including sequencing by mass spectrometry (see, e.g, PCT International Publication No. WO 94/16101; Cohen et al. (1996) Adv. Chromatogr. 36:127-162; and Griffin et al. (1993) Appl. Biochem. Biotechnol. 38:147-159).

[3013] Other methods for detecting mutations in the 8099, 46455, 54414, 53763, 67076, 67102, 44181, 67084FL, or 67084alt gene include methods in which protection from cleavage agents is used to detect mismatched bases in RNA/RNA or RNA/DNA heteroduplexes (Myers et al. (1985) Science 230:1242). In general, the art technique of “mismatch cleavage” starts by providing heteroduplexes of formed by hybridizing (labeled) RNA or DNA containing the wild-type 8099, 46455, 54414, 53763, 67076, 67102, 44181, 67084FL, or 67084alt sequence with potentially mutant RNA or DNA obtained from a tissue sample. The double-stranded duplexes are treated with an agent which cleaves single-stranded regions of the duplex such as which will exist due to basepair mismatches between the control and sample strands. For instance, RNA/DNA duplexes can be treated with RNase and DNA/DNA hybrids treated with S1 nuclease to enzymatically digesting the mismatched regions. In other embodiments, either DNA/DNA or RNA/DNA duplexes can be treated with hydroxylamine or osmium tetroxide and with piperidine in order to digest mismatched regions. After digestion of the mismatched regions, the resulting material is then separated by size on denaturing polyacrylamide gels to determine the site of mutation. See, for example, Cotton et al. (1988) Proc. Natl Acad Sci USA 85:4397; Saleeba et al. (1992) Methods Enzymol. 217:286-295. In a preferred embodiment, the control DNA or RNA can be labeled for detection.

[3014] In still another embodiment, the mismatch cleavage reaction employs one or more proteins that recognize mismatched base pairs in double-stranded DNA (so called “DNA mismatch repair” enzymes) in defined systems for detecting and mapping point mutations in 8099, 46455, 54414, 53763, 67076, 67102, 44181, 67084FL, or 67084alt cDNAs obtained from samples of cells. For example, the mutY enzyme of E. coli cleaves A at G/A mismatches and the thymidine DNA glycosylase from HeLa cells cleaves T at G/T mismatches (Hsu et al. (1994) Carcinogenesis 15:1657-1662). According to an exemplary embodiment, a probe based on a 8099, 46455, 54414, 53763, 67076, 67102, 44181, 67084FL, or 67084alt sequence, e.g, a wild-type 8099, 46455, 54414, 53763, 67076, 67102, 44181, 67084FL, or 67084alt sequence, is hybridized to a cDNA or other DNA product from a test cell(s). The duplex is treated with a DNA mismatch repair enzyme, and the cleavage products, if any, can be detected from electrophoresis protocols or the like. See, for example, U.S. Pat. No. 5,459,039.

[3015] In other embodiments, alterations in electrophoretic mobility will be used to identify mutations in 8099, 46455, 54414, 53763, 67076, 67102, 44181, 67084FL, or 67084alt genes. For example, single strand conformation polymorphism (SSCP) may be used to detect differences in electrophoretic mobility between mutant and wild type nucleic acids (Orita et al. (1989) Proc Natl. Acad. Sci USA: 86:2766, see also Cotton (1993) Mutat. Res. 285:125-144; and Hayashi (1992) Genet. Anal. Tech. Appl. 9:73-79). Single-stranded DNA fragments of sample and control 8099, 46455, 54414, 53763, 67076, 67102, 44181, 67084FL, or 67084alt nucleic acids will be denatured and allowed to renature. The secondary structure of single-stranded nucleic acids varies according to sequence, the resulting alteration in electrophoretic mobility enables the detection of even a single base change. The DNA fragments may be labeled or detected with labeled probes. The sensitivity of the assay may be enhanced by using RNA (rather than DNA), in which the secondary structure is more sensitive to a change in sequence. In a preferred embodiment, the subject method utilizes heteroduplex analysis to separate double stranded heteroduplex molecules on the basis of changes in electrophoretic mobility (Keen et al. (1991) Trends Genet 7:5).

[3016] In yet another embodiment the movement of mutant or wild-type fragments in polyacrylamide gels containing a gradient of denaturant is assayed using denaturing gradient gel electrophoresis (DGGE) (Myers et al. (1985) Nature 313:495). When DGGE is used as the method of analysis, DNA will be modified to insure that it does not completely denature, for example by adding a GC clamp of approximately 40 bp of high-melting GC-rich DNA by PCR. In a further embodiment, a temperature gradient is used in place of a denaturing gradient to identify differences in the mobility of control and sample DNA (Rosenbaum and Reissner (1987) Biophys Chem 265:12753).

[3017] Examples of other techniques for detecting point mutations include, but are not limited to, selective oligonucleotide hybridization, selective amplification, or selective primer extension. For example, oligonucleotide primers may be prepared in which the known mutation is placed centrally and then hybridized to target DNA under conditions which permit hybridization only if a perfect match is found (Saiki et al. (1986) Nature 324:163); Saiki et al. (1989) Proc. Natl Acad. Sci USA 86:6230). Such allele specific oligonucleotides are hybridized to PCR amplified target DNA or a number of different mutations when the oligonucleotides are attached to the hybridizing membrane and hybridized with labeled target DNA.

[3018] Alternatively, allele specific amplification technology which depends on selective PCR amplification may be used in conjunction with the instant invention. Oligonucleotides used as primers for specific amplification may carry the mutation of interest in the center of the molecule (so that amplification depends on differential hybridization) (Gibbs et al. (1989) Nucleic Acids Res. 17:2437-2448) or at the extreme 3′ end of one primer where, under appropriate conditions, mismatch can prevent, or reduce polymerase extension (Prossner (1993) Tibtech 11:238). In addition it may be desirable to introduce a novel restriction site in the region of the mutation to create cleavage-based detection (Gasparini et al. (1992) Mol. Cell Probes 6:1). It is anticipated that in certain embodiments amplification may also be performed using Taq ligase for amplification (Barany (1991) Proc. Natl. Acad. Sci USA 88:189). In such cases, ligation will occur only if there is a perfect match at the 3′ end of the 5′ sequence making it possible to detect the presence of a known mutation at a specific site by looking for the presence or absence of amplification.

[3019] The methods described herein may be performed, for example, by utilizing pre-packaged diagnostic kits comprising at least one probe nucleic acid or antibody reagent described herein, which may be conveniently used, e.g., in clinical settings to diagnose patients exhibiting symptoms or family history of a disease or illness involving a 8099, 46455, 54414, 53763, 67076, 67102, 44181, 67084FL, or 67084alt gene.

[3020] Furthermore, any cell type or tissue in which 8099, 46455, 54414, 53763, 67076, 67102, 44181, 67084FL, or 67084alt is expressed may be utilized in the prognostic assays described herein.

[3021] 3. Monitoring of Effects During Clinical Trials

[3022] Monitoring the influence of agents (e.g., drugs) on the expression or activity of a 8099, 46455, 54414, 53763, 67076, 67102, 44181, 67084FL, or 67084alt polypeptide (e.g., the modulation of gene expression, cellular signaling, 8099, 46455, 54414, 53763, 67076, 67102, 44181, 67084FL, or 67084alt activity, phospholipid transporter activity, and/or cell growth, proliferation, differentiation, absorption, and/or secretion mechanisms) can be applied not only in basic drug screening, but also in clinical trials. For example, the effectiveness of an agent determined by a screening assay as described herein to increase 8099, 46455, 54414, 53763, 67076, 67102, 44181, 67084FL, or 67084alt gene expression, polypeptide levels, or upregulate 8099, 46455, 54414, 53763, 67076, 67102, 44181, 67084FL, or 67084alt activity, can be monitored in clinical trials of subjects exhibiting decreased 8099, 46455, 54414, 53763, 67076, 67102, 44181, 67084FL, or 67084alt gene expression, polypeptide levels, or downregulated 8099, 46455, 54414, 53763, 67076, 67102, 44181, 67084FL, or 67084alt activity. Alternatively, the effectiveness of an agent determined by a screening assay to decrease 8099, 46455, 54414, 53763, 67076, 67102, 44181, 67084FL, or 67084alt gene expression, polypeptide levels, or downregulate 8099, 46455, 54414, 53763, 67076, 67102, 44181, 67084FL, or 67084alt activity, can be monitored in clinical trials of subjects exhibiting increased 8099, 46455, 54414, 53763, 67076, 67102, 44181, 67084FL, or 67084alt gene expression, polypeptide levels, or upregulated 8099, 46455, 54414, 53763, 67076, 67102, 44181, 67084FL, or 67084alt activity. In such clinical trials, the expression or activity of a 8099, 46455, 54414, 53763, 67076, 67102, 44181, 67084FL, or 67084alt gene, and preferably, other genes that have been implicated in, for example, a 8099, 46455, 54414, 53763, 67076, 67102, 44181, 67084FL, or 67084alt-associated disorder can be used as a “read out” or markers of the phenotype of a particular cell.

[3023] For example, and not by way of limitation, genes, including 8099, 46455, 54414, 53763, 67076, 67102, 44181, 67084FL, or 67084alt, that are modulated in cells by treatment with an agent (e.g., compound, drug or small molecule) which modulates 67076, 67102, 44181, 67084FL, or 67084alt activity (e.g., identified in a screening assay as described herein) can be identified.

[3024] Thus, to study the effect of agents on phospholipid transporter-associated disorders (e.g., disorders characterized by deregulated gene expression, cellular signaling, 67076, 67102, 44181, 67084FL, or 67084alt activity, phospholipid transporter activity, and/or cell growth, proliferation, differentiation, absorption, and/or secretion mechanisms), for example, in a clinical trial, cells can be isolated and RNA prepared and analyzed for the levels of expression of 67076, 67102, 44181, 67084FL, or 67084alt and other genes implicated in the transporter-associated disorder, respectively. The levels of gene expression (e.g., a gene expression pattern) can be quantified by northern blot analysis or RT-PCR, as described herein, or alternatively by measuring the amount of polypeptide produced, by one of the methods as described herein, or by measuring the levels of activity of 67076, 67102, 44181, 67084FL, or 67084alt or other genes. In this way, the gene expression pattern can serve as a marker, indicative of the physiological response of the cells to the agent. Accordingly, this response state may be determined before, and at various points during treatment of the individual with the agent.

[3025] In a preferred embodiment, the present invention provides a method for monitoring the effectiveness of treatment of a subject with an agent (e.g., an agonist, antagonist, peptidomimetic, protein, peptide, nucleic acid, small molecule, or other drug candidate identified by the screening assays described herein) including the steps of (i) obtaining a pre-administration sample from a subject prior to administration of the agent; (ii) detecting the level of expression of a 8099, 46455, 54414, 53763, 67076, 67102, 44181, 67084FL, or 67084alt polypeptide, mRNA, or genomic DNA in the preadministration sample; (iii) obtaining one or more post-administration samples from the subject; (iv) detecting the level of expression or activity of the 8099, 46455, 54414, 53763, 67076, 67102, 44181, 67084FL, or 67084alt polypeptide, mRNA, or genomic DNA in the post-administration samples; (v) comparing the level of expression or activity of the 8099, 46455, 54414, 53763, 67076, 67102, 44181, 67084FL, or 67084alt polypeptide, mRNA, or genomic DNA in the pre-administration sample with the 8099, 46455, 54414, 53763, 67076, 67102, 44181, 67084FL, or 67084alt polypeptide, mRNA, or genomic DNA in the post administration sample or samples; and (vi) altering the administration of the agent to the subject accordingly. For example, increased administration of the agent may be desirable to increase the expression or activity of 8099, 46455, 54414, 53763, 67076, 67102, 44181, 67084FL, or 67084alt to higher levels than detected, i.e., to increase the effectiveness of the agent. Alternatively, decreased administration of the agent may be desirable to decrease expression or activity of 8099, 46455, 54414, 53763, 67076, 67102, 44181, 67084FL, or 67084alt to lower levels than detected, i.e. to decrease the effectiveness of the agent. According to such an embodiment, 8099, 46455, 54414, 53763, 67076, 67102, 44181, 67084FL, or 67084alt expression or activity may be used as an indicator of the effectiveness of an agent, even in the absence of an observable phenotypic response.

[3026] D. Methods of Treatment:

[3027] The present invention provides for both prophylactic and therapeutic methods of treating a subject at risk of (or susceptible to) a disorder or having a disorder associated with aberrant or unwanted 8099, 46455, 54414, 53763, 67076, 67102, 44181, 67084FL, or 67084alt expression or activity, e.g. a phospholipid transporter-associated disorder. “Treatment”, as used herein, is defined as the application or administration of a therapeutic agent to a patient, or application or administration of a therapeutic agent to an isolated tissue or cell line from a patient, who has a disease or disorder, a symptom of disease or disorder or a predisposition toward a disease or disorder, with the purpose to cure, heal, alleviate, relieve, alter, remedy, ameliorate, improve or affect the disease or disorder, the symptoms of disease or disorder or the predisposition toward a disease or disorder. A therapeutic agent includes, but is not limited to, small molecules, peptides, antibodies, ribozymes and antisense oligonucleotides.

[3028] With regards to both prophylactic and therapeutic methods of treatment, such treatments may be specifically tailored or modified, based on knowledge obtained from the field of pharmacogenomics. “Pharmacogenomics”, as used herein, refers to the application of genomics technologies such as gene sequencing, statistical genetics, and gene expression analysis to drugs in clinical development and on the market. More specifically, the term refers the study of how a patient's genes determine his or her response to a drug (e.g., a patient's “drug response phenotype”, or “drug response genotype”). Thus, another aspect of the invention provides methods for tailoring an individual's prophylactic or therapeutic treatment with either the 8099, 46455, 54414, 53763, 67076, 67102, 44181, 67084FL, or 67084alt molecules of the present invention or 8099, 46455, 54414, 53763, 67076, 67102, 44181, 67084FL, or 67084alt modulators according to that individual's drug response genotype. Pharmacogenomics allows a clinician or physician to target prophylactic or therapeutic treatments to patients who will most benefit from the treatment and to avoid treatment of patients who will experience toxic drug-related side effects.

[3029] 1. Prophylactic Methods

[3030] In one aspect, the invention provides a method for preventing in a subject, a disease or condition associated with an aberrant or unwanted 8099, 46455, 54414, 53763, 67076, 67102, 44181, 67084FL, or 67084alt expression or activity, by administering to the subject a 8099, 46455, 54414, 53763, 67076, 67102, 44181, 67084FL, or 67084alt or an agent which modulates 8099, 46455, 54414, 53763, 67076, 67102, 44181, 67084FL, or 67084alt expression or at least one 8099, 46455, 54414, 53763, 67076, 67102, 44181, 67084FL, or 67084alt activity. Subjects at risk for a disease which is caused or contributed to by aberrant or unwanted 8099, 46455, 54414, 53763, 67076, 67102, 44181, 67084FL, or 67084alt expression or activity can be identified by, for example, any or a combination of diagnostic or prognostic assays as described herein. Administration of a prophylactic agent can occur prior to the manifestation of symptoms characteristic of the 8099, 46455, 54414, 53763, 67076, 67102, 44181, 67084FL, or 67084alt aberrancy, such that a disease or disorder is prevented or, alternatively, delayed in its progression. Depending on the type of 8099, 46455, 54414, 53763, 67076, 67102, 44181, 67084FL, or 67084alt aberrancy, for example, a 8099, 46455, 54414, 53763, 67076, 67102, 44181, 67084FL, or 67084alt, 8099, 46455, 54414, 53763, 67076, 67102, 44181, 67084FL, or 67084alt agonist or 8099, 46455, 54414, 53763, 67076, 67102, 44181, 67084FL, or 67084alt antagonist agent can be used for treating the subject. The appropriate agent can be determined based on screening assays described herein.

[3031] 2. Therapeutic Methods

[3032] Another aspect of the invention pertains to methods of modulating 8099, 46455, 54414, 53763, 67076, 67102, 44181, 67084FL, or 67084alt expression or activity for therapeutic purposes. Accordingly, in an exemplary embodiment, the modulatory method of the invention involves contacting a cell capable of expressing 8099, 46455, 54414, 53763, 67076, 67102, 44181, 67084FL, or 67084alt with an agent that modulates one or more of the activities of 8099, 46455, 54414, 53763, 67076, 67102, 44181, 67084FL, or 67084alt polypeptide activity associated with the cell, such that 8099, 46455, 54414, 53763, 67076, 67102, 44181, 67084FL, or 67084alt activity in the cell is modulated. An agent that modulates 8099, 46455, 54414, 53763, 67076, 67102, 44181, 67084FL, or 67084alt polypeptide activity can be an agent as described herein, such as a nucleic acid or a polypeptide, a naturally-occurring target molecule of a 8099, 46455, 54414, 53763, 67076, 67102, 44181, 67084FL, or 67084alt polypeptide (e.g., a 8099, 46455, 54414, 53763, 67076, 67102, 44181, 67084FL, or 67084alt substrate), a 8099, 46455, 54414, 53763, 67076, 67102, 44181, 67084FL, or 67084alt antibody, a 8099, 46455, 54414, 53763, 67076, 67102, 44181, 67084FL, or 67084alt agonist or antagonist, a peptidomimetic of a 8099, 46455, 54414, 53763, 67076, 67102, 44181, 67084FL, or 67084alt agonist or antagonist, or other small molecule. In one embodiment, the agent stimulates one or more 8099, 46455, 54414, 53763, 67076, 67102, 44181, 67084FL, or 67084alt activities. Examples of such stimulatory agents include active 8099, 46455, 54414, 53763, 67076, 67102, 44181, 67084FL, or 67084alt polypeptide and a nucleic acid molecule encoding 8099, 46455, 54414, 53763, 67076, 67102, 44181, 67084FL, or 67084alt that has been introduced into the cell. In another embodiment, the agent inhibits one or more 8099, 46455, 54414, 53763, 67076, 67102, 44181, 67084FL, or 67084alt activities. Examples of such inhibitory agents include antisense 8099, 46455, 54414, 53763, 67076, 67102, 44181, 67084FL, or 67084alt nucleic acid molecules, anti-8099, 46455, 54414, 53763, 67076, 67102, 44181, 67084FL, or 67084alt 3 antibodies, and 8099, 46455, 54414, 53763, 67076, 67102, 44181, 67084FL, or 67084alt inhibitors. These modulatory methods can be performed in vitro (e.g., by culturing the cell with the agent) or, alternatively, in vivo (e.g., by administering the agent to a subject). As such, the present invention provides methods of treating an individual afflicted with a disease or disorder characterized by aberrant or unwanted expression or activity of a 8099, 46455, 54414, 53763, 67076, 67102, 44181, 67084FL, or 67084alt polypeptide or nucleic acid molecule. In one embodiment, the method involves administering an agent (e.g., an agent identified by a screening assay described herein), or combination of agents that modulates (e.g., upregulates or downregulates) 8099, 46455, 54414, 53763, 67076, 67102, 44181, 67084FL, or 67084alt expression or activity. In another embodiment, the method involves administering a 8099, 46455, 54414, 53763, 67076, 67102, 44181, 67084FL, or 67084alt polypeptide or nucleic acid molecule as therapy to compensate for reduced, aberrant, or unwanted 8099, 46455, 54414, 53763, 67076, 67102, 44181, 67084FL, or 67084alt expression or activity.

[3033] Stimulation of 8099, 46455, 54414, 53763, 67076, 67102, 44181, 67084FL, or 67084alt activity is desirable in situations in which 8099, 46455, 54414, 53763, 67076, 67102, 44181, 67084FL, or 67084alt is abnormally downregulated and/or in which increased 8099, 46455, 54414, 53763, 67076, 67102, 44181, 67084FL, or 67084alt activity is likely to have a beneficial effect. Likewise, inhibition of 8099, 46455, 54414, 53763, 67076, 67102, 44181, 67084FL, or 67084alt activity is desirable in situations in which 8099, 46455, 54414, 53763, 67076, 67102, 44181, 67084FL, or 67084alt is abnormally upregulated and/or in which decreased 8099, 46455, 54414, 53763, 67076, 67102, 44181, 67084FL, or 67084alt activity is likely to have a beneficial effect.

[3034] 3. Pharmacogenomics

[3035] The 8099, 46455, 54414, 53763, 67076, 67102, 44181, 67084FL, or 67084alt molecules of the present invention, as well as agents, or modulators which have a stimulatory or inhibitory effect on 8099, 46455, 54414, 53763, 67076, 67102, 44181, 67084FL, or 67084alt activity (e.g., 8099, 46455, 54414, 53763, 67076, 67102, 44181, 67084FL, or 67084alt gene expression) as identified by a screening assay described herein can be administered to individuals to treat (prophylactically or therapeutically), for example, disorders characterized by aberrant 8099, 46455, 54414, 53763, 67076, 67102, 44181, 67084FL, or 67084alt gene expression, 8099, 46455, 54414, 53763, 67076, 67102, 44181, 67084FL, or 67084alt activity, membrane excitability or conductance, gene transcription, phospholipid transporter activity, cellular signaling, and/or cell growth, proliferation, differentiation, absorption, and/or secretion disorders associated with aberrant or unwanted 8099, 46455, 54414, 53763, 67076, 67102, 44181, 67084FL, or 67084alt activity. In conjunction with such treatment, pharmacogenomics (i.e., the study of the relationship between an individual's genotype and that individual's response to a foreign compound or drug) may be considered. Differences in metabolism of therapeutics can lead to severe toxicity or therapeutic failure by altering the relation between dose and blood concentration of the pharmacologically active drug. Thus, a physician or clinician may consider applying knowledge obtained in relevant pharmacogenomics studies in determining whether to administer a 8099, 46455, 54414, 53763, 67076, 67102, 44181, 67084FL, or 67084alt molecule or 8099, 46455, 54414, 53763, 67076, 67102, 44181, 67084FL, or 67084alt modulator as well as tailoring the dosage and/or therapeutic regimen of treatment with a 8099, 46455, 54414, 53763, 67076, 67102, 44181, 67084FL, or 67084alt molecule or 8099, 46455, 54414, 53763, 67076, 67102, 44181, 67084FL, or 67084alt modulator.

[3036] Pharmacogenomics deals with clinically significant hereditary variations in the response to drugs due to altered drug disposition and abnormal action in affected persons. See, for example, Eichelbaum, M. et al. (1996) Clin. Exp. Pharmacol. Physiol. 23(10-11): 983-985 and Linder, M. W. et al. (1997) Clin. Chem. 43(2):254-266. In general, two types of pharmacogenetic conditions can be differentiated. Genetic conditions transmitted as a single factor altering the way drugs act on the body (altered drug action) or genetic conditions transmitted as single factors altering the way the body acts on drugs (altered drug metabolism). These pharmacogenetic conditions can occur either as rare genetic defects or as naturally-occurring polymorphisms. For example, glucose-6-phosphate dehydrogenase deficiency (G6PD) is a common inherited enzymopathy in which the main clinical complication is haemolysis after ingestion of oxidant drugs (anti-malarials, sulfonamides, analgesics, nitrofurans) and consumption of fava beans.

[3037] One pharmacogenomics approach to identifying genes that predict drug response, known as “a genome-wide association”, relies primarily on a high-resolution map of the human genome consisting of already known gene-related markers (e.g., a “bi-allelic” gene marker map which consists of 60,000-100,000 polymorphic or variable sites on the human genome, each of which has two variants.) Such a high-resolution genetic map can be compared to a map of the genome of each of a statistically significant number of patients taking part in a Phase II/III drug trial to identify markers associated with a particular observed drug response or side effect. Alternatively, such a high resolution map can be generated from a combination of some ten-million known single nucleotide polymorphisms (SNPs) in the human genome. As used herein, a “SNP” is a common alteration that occurs in a single nucleotide base in a stretch of DNA. For example, a SNP may occur once per every 1000 bases of DNA. A SNP may be involved in a disease process, however, the vast majority may not be disease-associated. Given a genetic map based on the occurrence of such SNPs, individuals can be grouped into genetic categories depending on a particular pattern of SNPs in their individual genome. In such a manner, treatment regimens can be tailored to groups of genetically similar individuals, taking into account traits that may be common among such genetically similar individuals.

[3038] Alternatively, a method termed the “candidate gene approach”, can be utilized to identify genes that predict drug response. According to this method, if a gene that encodes a drugs target is known (e.g., a 8099,46455, 54414, 53763, 67076, 67102, 44181, 67084FL, or 67084alt polypeptide of the present invention), all common variants of that gene can be fairly easily identified in the population and it can be determined if having one version of the gene versus another is associated with a particular drug response.

[3039] As an illustrative embodiment, the activity of drug metabolizing enzymes is a major determinant of both the intensity and duration of drug action. The discovery of genetic polymorphisms of drug metabolizing enzymes (e.g., N-acetyltransferase 2 (NAT 2) and cytochrome P450 enzymes CYP2D6 and CYP2C19) has provided an explanation as to why some patients do not obtain the expected drug effects or show exaggerated drug response and serious toxicity after taking the standard and safe dose of a drug. These polymorphisms are expressed in two phenotypes in the population, the extensive metabolizer (EM) and poor metabolizer (PM). The prevalence of PM is different among different populations. For example, the gene coding for CYP2D6 is highly polymorphic and several mutations have been identified in PM, which all lead to the absence of functional CYP2D6. Poor metabolizers of CYP2D6 and CYP2C19 quite frequently experience exaggerated drug response and side effects when they receive standard doses. If a metabolite is the active therapeutic moiety, PM show no therapeutic response, as demonstrated for the analgesic effect of codeine mediated by its CYP2D6-formed metabolite morphine. The other extreme are the so called ultra-rapid metabolizers who do not respond to standard doses. Recently, the molecular basis of ultra-rapid metabolism has been identified to be due to CYP2D6 gene amplification.

[3040] Alternatively, a method termed the “gene expression profiling”, can be utilized to identify genes that predict drug response. For example, the gene expression of an animal dosed with a drug (e.g., a 8099, 46455, 54414, 53763, 67076, 67102, 44181, 67084FL, or 67084alt molecule or 8099, 46455, 54414, 53763, 67076, 67102, 44181, 67084FL, or 67084alt modulator of the present invention) can give an indication whether gene pathways related to toxicity have been turned on.

[3041] Information generated from more than one of the above pharmacogenomics approaches can be used to determine appropriate dosage and treatment regimens for prophylactic or therapeutic treatment an individual. This knowledge, when applied to dosing or drug selection, can avoid adverse reactions or therapeutic failure and thus enhance therapeutic or prophylactic efficiency when treating a subject with a 8099, 46455, 54414, 53763, 67076, 67102, 44181, 67084FL, or 67084alt molecule or 8099, 46455, 54414, 53763, 67076, 67102, 44181, 67084FL, or 67084alt modulator, such as a modulator identified by one of the exemplary screening assays described herein.

[3042] 4. Use of 8099, 46455, 54414, 53763, 67076, 67102, 44181, 67084FL, or 67084alt Molecules as Surrogate Markers

[3043] The 8099, 46455, 54414, 53763, 67076, 67102, 44181, 67084FL, or 67084alt molecules of the invention are also useful as markers of disorders or disease states, as markers for precursors of disease states, as markers for predisposition of disease states, as markers of drug activity, or as markers of the pharmacogenomic profile of a subject. Using the methods described herein, the presence, absence and/or quantity of the 8099, 46455, 54414, 53763, 67076, 67102, 44181, 67084FL, or 67084alt molecules of the invention may be detected, and may be correlated with one or more biological states in vivo. For example, the 8099, 46455, 54414, 53763, 67076, 67102, 44181, 67084FL, or 67084alt molecules of the invention may serve as surrogate markers for one or more disorders or disease states or for conditions leading up to disease states. As used herein, a “surrogate marker” is an objective biochemical marker which correlates with the absence or presence of a disease or disorder, or with the progression of a disease or disorder (e.g., with the presence or absence of a tumor). The presence or quantity of such markers is independent of the disease. Therefore, these markers may serve to indicate whether a particular course of treatment is effective in lessening a disease state or disorder. Surrogate markers are of particular use when the presence or extent of a disease state or disorder is difficult to assess through standard methodologies (e.g., early stage tumors), or when an assessment of disease progression is desired before a potentially dangerous clinical endpoint is reached (e.g., an assessment of cardiovascular disease may be made using cholesterol levels as a surrogate marker, and an analysis of HIV infection may be made using HIV RNA levels as a surrogate marker, well in advance of the undesirable clinical outcomes of myocardial infarction or fully-developed AIDS). Examples of the use of surrogate markers in the art include: Koomen et al. (2000) J. Mass. Spectrom. 35: 258-264; and James (1994) AIDS Treatment News Archive 209.

[3044] The 8099, 46455, 54414, 53763, 67076, 67102, 44181, 67084FL, or 67084alt molecules of the invention are also useful as pharmacodynamic markers. As used herein, a “pharmacodynamic marker” is an objective biochemical marker which correlates specifically with drug effects. The presence or quantity of a pharmacodynamic marker is not related to the disease state or disorder for which the drug is being administered; therefore, the presence or quantity of the marker is indicative of the presence or activity of the drug in a subject. For example, a pharmacodynamic marker may be indicative of the concentration of the drug in a biological tissue, in that the marker is either expressed or transcribed or not expressed or transcribed in that tissue in relationship to the level of the drug. In this fashion, the distribution or uptake of the drug may be monitored by the pharmacodynamic marker. Similarly, the presence or quantity of the pharmacodynamic marker may be related to the presence or quantity of the metabolic product of a drug, such that the presence or quantity of the marker is indicative of the relative breakdown rate of the drug in vivo. Pharmacodynamic markers are of particular use in increasing the sensitivity of detection of drug effects, particularly when the drug is administered in low doses. Since even a small amount of a drug may be sufficient to activate multiple rounds of marker (e.g., a 8099, 46455, 54414, 53763, 67076, 67102, 44181, 67084FL, or 67084alt marker) transcription or expression, the amplified marker may be in a quantity which is more readily detectable than the drug itself. Also, the marker may be more easily detected due to the nature of the marker itself; for example, using the methods described herein, anti-8099, 46455, 54414, 53763, 67076, 67102, 44181, 67084FL, or 67084alt antibodies may be employed in an immune-based detection system for a 8099, 46455, 54414, 53763, 67076, 67102, 44181, 67084FL, or 67084alt polypeptide marker, or 8099, 46455, 54414, 53763, 67076, 67102, 44181, 67084FL, or 67084alt-specific radiolabeled probes may be used to detect a 8099, 46455, 54414, 53763, 67076, 67102, 44181, 67084FL, or 67084alt mRNA marker. Furthermore, the use of a pharmacodynamic marker may offer mechanism-based prediction of risk due to drug treatment beyond the range of possible direct observations. Examples of the use of pharmacodynamic markers in the art include: Matsuda et al. U.S. Pat. No. 6,033,862; Hattis et al. (1991) Env. Health Perspect. 90: 229-238; Schentag (1999) Am. J. Health-Syst. Pharm. 56 Suppl. 3: S21-S24; and Nicolau (1999) Am, J. Health-Syst. Pharm. 56 Suppl. 3: S16-S20.

[3045] The 8099, 46455, 54414, 53763, 67076, 67102, 44181, 67084FL, or 67084alt molecules of the invention are also useful as pharmacogenomic markers. As used herein, a “pharmacogenomic marker” is an objective biochemical marker which correlates with a specific clinical drug response or susceptibility in a subject (see, e.g., McLeod et al. (1999) Eur. J. Cancer 35(12): 1650-1652). The presence or quantity of the pharmacogenomic marker is related to the predicted response of the subject to a specific drug or class of drugs prior to administration of the drug. By assessing the presence or quantity of one or more pharmacogenomic markers in a subject, a drug therapy which is most appropriate for the subject, or which is predicted to have a greater degree of success, may be selected. For example, based on the presence or quantity of RNA, or polypeptide (e.g., 8099, 46455, 54414, 53763, 67076, 67102, 44181, 67084FL, or 67084alt polypeptide or RNA) for specific tumor markers in a subject, a drug or course of treatment may be selected that is optimized for the treatment of the specific tumor likely to be present in the subject. Similarly, the presence or absence of a specific sequence mutation in 8099, 46455, 54414, 53763, 67076, 67102, 44181, 67084FL, or 67084alt DNA may correlate 8099, 46455, 54414, 53763, 67076, 67102, 44181, 67084FL, or 67084alt drug response. The use of pharmacogenomic markers therefore permits the application of the most appropriate treatment for each subject without having to administer the therapy.

[3046] VI. Electronic Apparatus Readable Media and Arrays

[3047] Electronic apparatus readable media comprising 8099, 46455, 54414, 53763, 67076, 67102, 44181, 67084FL, or 67084alt sequence information is also provided. As used herein, “8099, 46455, 54414, 53763, 67076, 67102, 44181, 67084FL, or 67084alt sequence information” refers to any nucleotide and/or amino acid sequence information particular to the 8099, 46455, 54414, 53763, 67076, 67102, 44181, 67084FL, or 67084alt molecules of the present invention, including but not limited to full-length nucleotide and/or amino acid sequences, partial nucleotide and/or amino acid sequences, polymorphic sequences including single nucleotide polymorphisms (SNPs), epitope sequences, and the like. Moreover, information “related to” said 8099, 46455, 54414, 53763, 67076, 67102, 44181, 67084FL, or 67084alt sequence information includes detection of the presence or absence of a sequence (e.g., detection of expression of a sequence, fragment, polymorphism, etc.), determination of the level of a sequence (e.g., detection of a level of expression, for example, a quantitative detection), detection of a reactivity to a sequence (e.g., detection of protein expression and/or levels, for example, using a sequence-specific antibody), and the like. As used herein, “electronic apparatus readable media” refers to any suitable medium for storing, holding or containing data or information that can be read and accessed directly by an electronic apparatus. Such media can include, but are not limited to: magnetic storage media, such as floppy discs, hard disc storage medium, and magnetic tape; optical storage media such as compact disc; electronic storage media such as RAM, ROM, EPROM, EEPROM and the like; general hard disks and hybrids of these categories such as magnetic/optical storage media. The medium is adapted or configured for having recorded thereon 8099, 46455, 54414, 53763, 67076, 67102, 44181, 67084FL, or 67084alt sequence information of the present invention.

[3048] As used herein, the term “electronic apparatus” is intended to include any suitable computing or processing apparatus or other device configured or adapted for storing data or information. Examples of electronic apparatus suitable for use with the present invention include stand-alone computing apparatus; networks, including a local area network (LAN), a wide area network (WAN) Internet, Intranet, and Extranet; electronic appliances such as a personal digital assistants (PDAs), cellular phone, pager and the like; and local and distributed processing systems.

[3049] As used herein, “recorded” refers to a process for storing or encoding information on the electronic apparatus readable medium. Those skilled in the art can readily adopt any of the presently known methods for recording information on known media to generate manufactures comprising the 8099, 46455, 54414, 53763, 67076, 67102, 44181, 67084FL, or 67084alt sequence information.

[3050] A variety of software programs and formats can be used to store the sequence information on the electronic apparatus readable medium. For example, the sequence information can be represented in a word processing text file, formatted in commercially-available software such as WordPerfect and Microsoft Word, or represented in the form of an ASCII file, stored in a database application, such as DB2, Sybase, Oracle, or the like, as well as in other forms. Any number of dataprocessor structuring formats (e.g., text file or database) may be employed in order to obtain or create a medium having recorded thereon the 8099, 46455, 54414, 53763, 67076, 67102, 44181, 67084FL, or 67084alt sequence information.

[3051] By providing 8099, 46455, 54414, 53763, 67076, 67102, 44181, 67084FL, or 67084alt sequence information in readable form, one can routinely access the sequence information for a variety of purposes. For example, one skilled in the art can use the sequence information in readable form to compare a target sequence or target structural motif with the sequence information stored within the data storage means. Search means are used to identify fragments or regions of the sequences of the invention which match a particular target sequence or target motif.

[3052] The present invention therefore provides a medium for holding instructions for performing a method for determining whether a subject has a 8099, 46455, 54414, 53763, 67076, 67102, 44181, 67084FL, or 67084alt-associated disease or disorder or a pre-disposition to a 8099, 46455, 54414, 53763, 67076, 67102, 44181, 67084FL, or 67084alt-associated disease or disorder, wherein the method comprises the steps of determining 8099, 46455, 54414, 53763, 67076, 67102, 44181, 67084FL, or 67084alt sequence information associated with the subject and based on the 8099, 46455, 54414, 53763, 67076, 67102, 44181, 67084FL, or 67084alt sequence information, determining whether the subject has a 8099, 46455, 54414, 53763, 67076, 67102, 44181, 67084FL, or 67084alt-associated disease or disorder or a pre-disposition to a 8099, 46455, 54414, 53763, 67076, 67102, 44181, 67084FL, or 67084alt-associated disease or disorder and/or recommending a particular treatment for the disease, disorder or pre-disease condition.

[3053] The present invention further provides in an electronic system and/or in a network, a method for determining whether a subject has a 8099, 46455, 54414, 53763, 67076, 67102, 44181, 67084FL, or 67084alt-associated disease or disorder or a pre-disposition to a disease associated with a 8099, 46455, 54414, 53763, 67076, 67102, 44181, 67084FL, or 67084alt wherein the method comprises the steps of determining 8099, 46455, 54414, 53763, 67076, 67102, 44181, 67084FL, or 67084alt sequence information associated with the subject, and based on the 8099, 46455, 54414, 53763, 67076, 67102, 44181, 67084FL, or 67084alt sequence information, determining whether the subject has a 8099, 46455, 54414, 53763, 67076, 67102, 44181, 67084FL, or 67084alt-associated disease or disorder or a pre-disposition to a 8099, 46455, 54414, 53763, 67076, 67102, 44181, 67084FL, or 67084alt-associated disease or disorder, and/or recommending a particular treatment for the disease, disorder or pre-disease condition. The method may further comprise the step of receiving phenotypic information associated with the subject and/or acquiring from a network phenotypic information associated with the subject.

[3054] The present invention also provides in a network, a method for determining whether a subject has a 8099, 46455, 54414, 53763, 67076, 67102, 44181, 67084FL, or 67084alt-associated disease or disorder or a pre-disposition to a 8099, 46455, 54414, 53763, 67076, 67102, 44181, 67084FL, or 67084alt-associated disease or disorder associated with 8099, 46455, 54414, 53763, 67076, 67102, 44181, 67084FL, or 67084alt, said method comprising the steps of receiving 8099, 46455, 54414, 53763, 67076, 67102, 44181, 67084FL, or 67084alt sequence information from the subject and/or information related thereto, receiving phenotypic information associated with the subject, acquiring information from the network corresponding to 8099, 46455, 54414, 53763, 67076, 67102, 44181, 67084FL, or 67084alt and/or a 8099, 46455, 54414, 53763, 67076, 67102, 44181, 67084FL, or 67084alt-associated disease or disorder, and based on one or more of the phenotypic information, the 8099, 46455, 54414, 53763, 67076, 67102, 44181, 67084FL, or 67084alt information (e.g., sequence information and/or information related thereto), and the acquired information, determining whether the subject has a 8099, 46455, 54414, 53763, 67076, 67102, 44181, 67084FL, or 67084alt-associated disease or disorder or a pre-disposition to a 8099, 46455, 54414, 53763, 67076, 67102, 44181, 67084FL, or 67084alt-associated disease or disorder. The method may further comprise the step of recommending a particular treatment for the disease, disorder or pre-disease condition.

[3055] The present invention also provides a business method for determining whether a subject has a 8099, 46455, 54414, 53763, 67076, 67102, 44181, 67084FL, or 67084alt-associated disease or disorder or a pre-disposition to a 8099, 46455, 54414, 53763, 67076, 67102, 44181, 67084FL, or 67084alt-associated disease or disorder, said method comprising the steps of receiving information related to 8099, 46455, 54414, 53763, 67076, 67102, 44181, 67084FL, or 67084alt (e.g., sequence information and/or information related thereto), receiving phenotypic information associated with the subject, acquiring information from the network related to 8099, 46455, 54414, 53763, 67076, 67102, 44181, 67084FL, or 67084alt and/or related to a 8099, 46455, 54414, 53763, 67076, 67102, 44181, 67084FL, or 67084alt-associated disease or disorder, and based on one or more of the phenotypic information, the 8099, 46455, 54414, 53763, 67076, 67102, 44181, 67084FL, or 67084alt information, and the acquired information, determining whether the subject has a 8099, 46455, 54414, 53763, 67076, 67102, 44181, 67084FL, or 67084alt-associated disease or disorder or a pre-disposition to a 8099, 46455, 54414, 53763, 67076, 67102, 44181, 67084FL, or 67084alt-associated disease or disorder. The method may further comprise the step of recommending a particular treatment for the disease, disorder or pre-disease condition.

[3056] The invention also includes an array comprising a 8099, 46455, 54414, 53763, 67076, 67102, 44181, 67084FL, or 67084alt sequence of the present invention. The array can be used to assay expression of one or more genes in the array. In one embodiment, the array can be used to assay gene expression in a tissue to ascertain tissue specificity of genes in the array. In this manner, up to about 7600 genes can be simultaneously assayed for expression, one of which can be 8099, 46455, 54414, 53763, 67076, 67102, 44181, 67084FL, or 67084alt. This allows a profile to be developed showing a battery of genes specifically expressed in one or more tissues.

[3057] In addition to such qualitative determination, the invention allows the quantitation of gene expression. Thus, not only tissue specificity, but also the level of expression of a battery of genes in the tissue is ascertainable. Thus, genes can be grouped on the basis of their tissue expression per se and level of expression in that tissue. This is useful, for example, in ascertaining the relationship of gene expression between or among tissues. Thus, one tissue can be perturbed and the effect on gene expression in a second tissue can be determined. In this context, the effect of one cell type on another cell type in response to a biological stimulus can be determined. Such a determination is useful, for example, to know the effect of cell-cell interaction at the level of gene expression. If an agent is administered therapeutically to treat one cell type but has an undesirable effect on another cell type, the invention provides an assay to determine the molecular basis of the undesirable effect and thus provides the opportunity to co-administer a counteracting agent or otherwise treat the undesired effect. Similarly, even within a single cell type, undesirable biological effects can be determined at the molecular level. Thus, the effects of an agent on expression of other than the target gene can be ascertained and counteracted.

[3058] In another embodiment, the array can be used to monitor the time course of expression of one or more genes in the array. This can occur in various biological contexts, as disclosed herein, for example development of a 8099, 46455, 54414, 53763, 67076, 67102, 44181, 67084FL, or 67084alt-associated disease or disorder, progression of 8099, 46455, 54414, 53763, 67076, 67102, 44181, 67084FL, or 67084alt-associated disease or disorder, and processes, such a cellular transformation associated with the 8099, 46455, 54414, 53763, 67076, 67102, 44181, 67084FL, or 67084alt-associated disease or disorder.

[3059] The array is also useful for ascertaining the effect of the expression of a gene on the expression of other genes in the same cell or in different cells (e.g., ascertaining the effect of 8099, 46455, 54414, 53763, 67076, 67102, 44181, 67084FL, or 67084alt expression on the expression of other genes). This provides, for example, for a selection of alternate molecular targets for therapeutic intervention if the ultimate or downstream target cannot be regulated.

[3060] The array is also useful for ascertaining differential expression patterns of one or more genes in normal and abnormal cells. This provides a battery of genes (e.g., including 8099, 46455, 54414, 53763, 67076, 67102, 44181, 67084FL, or 67084alt ) that could serve as a molecular target for diagnosis or therapeutic intervention.

[3061] This invention is further illustrated by the following examples which should not be construed as limiting. The contents of all references, patents and published patent applications cited throughout this application, as well as the Figures and the Sequence Listing, are incorporated herein by reference.

### EXAMPLES

### Example 1

### Identification and Characterization of Human 8099, 46455, 54414, 53763, 67076, 67102, 44181, 67084FL, and 67084alt cDNAs

[3062] In this example, the identification and characterization of the gene encoding human 8099, 46455, 54414, 53763, 67076, 67102, 44181, full length 67084 (67084FL), and 67084alt is described.

[3063] Isolation of the Human 8099 and 46455 cDNAs

[3064] The invention is based, at least in part, on the discovery of a human gene encoding a novel polypeptide, referred to herein as human 8099. The entire sequence of the human clone 8099 was determined and found to contain an open reading frame termed human “8099.” The nucleotide sequence of the human 8099 gene is set forth in FIGS. 44A-44D and in the Sequence Listing as SEQ ID NO:46. The amino acid sequence of the human 8099 expression product is set forth in FIGS. 44A-D and in the Sequence Listing as SEQ ID NO:47. The 8099 polypeptide comprises 617 amino acids. The coding region (open reading frame) of SEQ ID NO:46 is set forth as SEQ ID NO:48. Clone 8099, comprising the coding region of human 8099, was deposited with the American Type Culture Collection (ATCC®), 10801 University Boulevard, Manassas, Va. 20110-2209, on ______, and assigned Accession No. ______.

[3065] The invention is further based, at least in part, on the discovery of a human gene encoding a novel polypeptide, referred to herein as human 46455. The entire sequence of the human clone 46455 was determined and found to contain an open reading frame termed human “46455.” The nucleotide sequence of the human 46455 gene is set forth in FIGS. 47A-B and in the Sequence Listing as SEQ ID NO:49. The amino acid sequence of the human 46455 expression product is set forth in FIGS. 51A-51D and in the Sequence Listing as SEQ ID NO:50. The 46455 polypeptide comprises 528 amino acids. The coding region (open reading frame) of SEQ ID NO:49 is set forth as SEQ ID NO:51. Clone 46455, comprising the coding region of human 46455, was deposited with the American Type Culture Collection (ATCC®), 10801 University Boulevard, Manassas, Va. 20110-2209, on ______, and assigned Accession No. ______.

[3066] Analysis of the Human 8099 and 46455 Molecules

[3067] A search using the polypeptide sequence of SEQ ID NO:47 was performed against the HMM database in PFAM (FIGS. 46A-46G) resulting in the identification of a sugar transporter family domain in the amino acid sequence of human 8099 at about residues 43-564 of SEQ ID NO:47 (score=318.2), a potential FecCD family domain in the amino acid sequence of human 8099 at about residues 26-227 of SEQ ID NO:47 (score=−218.2), and a potential monocarboxylate transporter domain in the amino acid sequence of human 8099 at about residues 29-567 of SEQ ID NO:47 (score=−235.8).

[3068] The amino acid sequence of human 8099 was analyzed using the program PSORT (available through the Prosite website) to predict the localization of the proteins within the cell. This program assesses the presence of different targeting and localization amino acid sequences within the query sequence. The results of this analysis show that human 8099 may be localized to the endoplasmic reticulum or mitochondria.

[3069] Searches of the amino acid sequence of human 8099 were further performed against the Prosite database. These searches resulted in the identification in the amino acid sequence of human 8099 of a number of potential N-glycosylation sites at about amino acid residues 371-374, 383-386, 396-399, 401-404 of SEQ ID NO:47, a number of potential protein kinase C phosphorylation sites at about amino acid residues 220-222, 256-258, 403-405 of SEQ ID NO:47, a number of potential casein kinase II phosphorylation sites at about amino acid residues 18-21, 75-78, 169-172, 246-249, 256-259, 264-267, 385-388, 403-406, 443-446, 520-523 of SEQ ID NO:47, a number of potential N-myristoylation sites at about amino acid residues 51-56, 59-64, 89-94, 141-146, 165-170, 178-183, 207-212, 228-233, 395-400, 441-446, and 493-498 of SEQ ID NO:47, a potential amidation site at about amino acid residues 104-107 of SEQ ID NO:47, a potential leucine zipper motif at about amino acid residues 112-133 of SEQ ID NO:47, and potential sugar transport protein signature 1 domain at about amino acid residues 97-114 of SEQ ID NO:47.

[3070] A MEMSAT analysis of the polypeptide sequence of SEQ ID NO:47 was also performed, predicting thirteen transmembrane domains in the amino acid sequence of human 8099 (SEQ ID NO:47) at about residues 32-49, 58-74, 81-101, 109-130, 138-156, 165-184, 198-217, 279-301, 315-338, 346-364, 463-487, 499-521, and 529-549. Further analysis of the amino acid sequence of SEQ ID NO:47 (e.g., alignment with, for example, known E. coli sugar symporter proteins and a known human facilitative glucose transporter protein) showed that the second transmembrane domain at about amino acid residues 58-74 of SEQ ID NO:47 is not utilized, resulting in the presence of twelve transmembrane domains in the amino acid sequence of human 8099 (SEQ ID NO:47).

[3071] A search of the amino acid sequence of human 8099 was also performed against the ProDom database resulting in the identification of several transmembrane domains, a glycosyltransferase domain, and a sugar transport domain in the amino acid sequence of SEQ ID NO:47.

[3072] The human 8099 amino acid sequence was aligned with the amino acid sequence of the galactose-proton symporter GALP from E. coli l using the CLUSTAL W (1.74) multiple sequence alignment program. The results of the alignment are set forth in FIGS. 47A-B. The human 8099 amino acid sequence was also aligned with the amino acid sequence of the arabinose-proton symporter ARAE from E. coli using the CLUSTAL W (1.74) multiple sequence alignment program. The results of the alignment are set forth in FIGS. 48A-B. The human 8099 amino acid sequence was also aligned with the amino acid sequence of the facilitative glucose transporter GLUT8 from Homo sapiens using the CLUSTAL W (1.74) multiple sequence alignment program. The results of the alignment are set forth in FIGS. 50A-B. Based on its homology to GLUT8, 8099 is also referred to herein as “GLUT8 homologue” or “GLUT8h” and can be used interchangeably throughout.

[3073] A search using the polypeptide sequence of human 46455 (SEQ ID NO:50) was performed against the HMM database in PFAM (FIGS. 53A-53G) resulting in the identification of a sugar transporter family domain in the amino acid sequence of human 46455 at about residues 58-469 of SEQ ID NO:50 (score=−63.4), a potential sodium:galactoside symporter family domain in the amino acid sequence of human 46455 at about residues 212-505 of SEQ ID NO:50 (score=−121.2), and a potential monocarboxylate transporter domain in the amino acid sequence of human 46455 at about residues 60-473 of SEQ ID NO:50 (score=−208.2).

[3074] The amino acid sequence of human 46455 was analyzed using the program PSORT to predict the localization of the proteins within the cell. This program assesses the presence of different targeting and localization amino acid sequences within the query sequence. The results of this analysis show that human 46455 may be localized to the endoplasmic reticulum, mitochondria, nucleus or secretory vesicles.

[3075] Searches of the amino acid sequence of human 46455 were further performed against the Prosite database. These searches resulted in the identification in the amino acid sequence of human 46455 of a potential N-glycosylation site at about amino acid residues 199-202 of SEQ ID NO:50, a potential cAMP- and cGMP-dependent protein kinase C phosphorylation site at about amino acid residues 414-417 of SEQ ID NO:50, a number of potential protein kinase C phosphorylation sites at about amino acid residues 344-346, 413-415, 442-444, and 518-520 of SEQ ID NO:50, a number of potential casein kinase II phosphorylation sites at about amino acid residues 11-14, 943-946, 959-962, 983-986, 1074-1077, 1108-1111, and 1112-1115 of SEQ ID NO:50, a number of potential N-myristoylation sites at about amino acid residues 89-94, 106-111, 288-293, 679-684, 767-772, 847-852, and 933-938 of SEQ ID NO:50, an amidation site at about amino acid residues 223-226 of SEQ ID NO:50, and an ATP/GTP-binding site motif A (P-loop) at about amino acid residues 1008-1015 of SEQ ID NO:50.

[3076] A MEMSAT analysis of the polypeptide sequence of SEQ ID NO:50 was also performed, predicting eleven transmembrane domains in the amino acid sequence of human 46455 (SEQ ID NO:50) at about residues 98-118, 126-145, 165-181, 188-205, 218-238, 273-294, 323-341, 357-377, 386-410, 423-441, and 462-485. Further analysis of the amino acid sequence of SEQ ID NO:50 (e.g., analysis of the hydropathy plot set forth in FIG. 52) resulted in the identification of a twelfth transmembrane domain at about amino acid residues 58-74 of SEQ ID NO:50.

[3077] A search of the amino acid sequence of human 46455 was also performed against the ProDom database resulting in the identification of a transmembrane efflux domain in the amino acid sequence of SEQ ID NO:50.

[3078] The human 46455 amino acid sequence was aligned with the amino acid sequence of Z92825 from C. elegans using the CLUSTAL W (1.74) multiple sequence alignment program. The results of the alignment are set forth in FIGS. 54A-B.

[3079] Isolation of the Human 54414 and 53763 cDNA

[3080] The invention is based, at least in part, on the discovery of genes encoding novel members of the potassium channel family. The entire sequence of human clone Fbh54414 was determined and found to contain an open reading frame termed human “54414”. The entire sequence of human clone Fbh53763 was determined and found to contain an open reading frame termed human “53763”.

[3081] The nucleotide sequence encoding the human 54414 is shown in FIGS. 55A-55H and is set forth as SEQ ID NO:52. The protein encoded by this nucleic acid comprises about 1118 amino acids and has the amino acid sequence shown in FIGS. 55A-55H and set forth as SEQ ID NO:53. The coding region (open reading frame) of SEQ ID NO:52 is set forth as SEQ ID NO:54. Clone Fbh54414, comprising the coding region of human 54414, was deposited with the American Type Culture Collection (ATCC®), 10801 University Boulevard, Manassas, Va. 20110-2209, on ______, and assigned Accession No. ______.

[3082] The nucleotide sequence encoding the human 53763 is shown in FIGS. 59A-59D and is set forth as SEQ ID NO:55. The protein encoded by this nucleic acid comprises about 638 amino acids and has the amino acid sequence shown in FIGS. 59A-59D and set forth as SEQ ID NO:56. The coding region (open reading frame) of SEQ ID NO:55 is set forth as SEQ ID NO:57. Clone Fbh53763, comprising the coding region of human 53763, was deposited with the American Type Culture Collection (ATCC®), 10801 University Boulevard, Manassas, Va. 20110-2209, on ______, and assigned Accession No. ______.

[3083] Analysis of the Human 54414 and 53763 Molecules

[3084] The amino acid sequences of human 54414 was analyzed using the program PSORT to predict the localization of the proteins within the cell. The results of the analyses show that human 54414 may be localized to the endoplasmic reticulum, the nucleus, secretory vesicles, or the mitochondria.

[3085] Analysis of the amino acid sequences of human 54414 was performed using MEMSAT. The amino acid sequence of human 54414 was also compared to the amino acid sequences of known potassium transporters (FIGS. 58A-58D). This analysis resulted in the identification of six possible transmembrane domains in the amino acid sequence of human 54414 at residues 64-83, 104-127, 135-153, 161-173, 199-217, and 257-274 of SEQ ID NO:53 (FIG. 56).

[3086] Searches of the amino acid sequences of human 54414 were performed against the HMM database (FIGS. 57A-B). These searches resulted in the identification of an “ion transport protein domain”, at about residues 104-277 of SEQ ID NO:53 (score=62.4).

[3087] Searches of the amino acid sequence of human 54414 were further performed against the Prosite™ database. These searches resulted in the identification of several possible N-glycosylation sites at about amino acids residues 66-69, 99-102, 290-293, 545-548, 554-557, 573-576, 981-984, and 1106-1109 of SEQ ID NO:53, several possible cAMP- and cGMP-dependent protein kinase phosphorylation sites at about amino acids residues 625-628, 994-997, 1002-1005, and 1100-1103 of SEQ ID NO:53, several possible protein kinase C phosphorylation sites at about amino acid residues 43-45, 59-61, 68-70, 126-128, 158-160, 254-256, 298-300, 308-310, 354-356, 385-387, 464-466, 605-607, 903-905, 939-941, 947-949, 1005-1007, 1012-1014, 1030-1032, and 1099-1101 of SEQ ID NO:53, several possible casein kinase II phosphorylation sites at about amino acid residues 43-46, 115-118, 338-341, 386-389, 393-396, 485-488, 556-559, 651-654, 655-658, 663-666, 784-787, 837-840, 867-870, 907-910, 926-929, 943-946, 959-962, 983-986, 1074-1077, 1108-1111, and 1112-1115 of SEQ ID NO:53, several possible N-myristoylation sites at about amino acid residues 89-94, 106-111, 288-293, 679-684, 767-772, 847-852, and 933-938 of SEQ ID NO:53, a possible amidation site at about amino acid residues 223-226 of SEQ ID NO:53, and a possible ATP/GTP-binding site motif A (P-loop) at about amino acid residues 1008-1015 of SEQ ID NO:53.

[3088] The amino acid sequence of human 53763 was analyzed using the program PSORT to predict the localization of the proteins within the cell. The results of the analyses further show that human 53763 may be localized to the endoplasmic reticulum, the mitochondria, or the nucleus.

[3089] Analysis of the amino acid sequences of human 53763 was performed using MEMSAT. The amino acid sequence of human 53763 was also compared to the amino acid sequences of known potassium transporters (FIGS. 62A-B). This analysis resulted in the identification of six possible transmembrane domains in the amino acid sequence of human 53763 at residues 230-248, 287-303, 314-335, 346-368, 382-402, and 451-473 of SEQ ID NO:56 (FIG. 60).

[3090] Searches of the amino acid sequence of human 53763 were also performed against the HMM database (FIGS. 61A-61E). These searches resulted in the identification of a “NADH-ubiquinone/plastoquinone oxidoreductase domain” at about residues 317-467 of SEQ ID NO:56 (score=−81.7), an “ion transport protein domain” at about residues 281-472 of SEQ ID NO:56 (score=116.9), and a “K⁺ channel tetramerization domain” at about residues 8-156 of SEQ ID NO:56 (score=156.7).

[3091] Searches of the amino acid sequence of human 53763 were also performed against the Prosite™ database. These searches resulted in the identification in the amino acid sequence of human 53763 a number of potential N-glycosylation sites at amino acid residues 84-84, 259-262, 266-269, 518-521, and 536-539 of SEQ ID NO:56, a potential cAMP- and cGMP-dependent protein kinase phosphorylation site at amino acid residues 561-564 of SEQ ID NO:56, protein kinase C phosphorylation sites at amino acid residues 21-23, 25-27, 86-88, 120-122, 155-157, 205-207, 224-226, 336-338, 374-376, and 564-566 of SEQ ID NO:56, casein kinase II phosphorylation sites at amino acid residues 17-20, 49-52, 146-149, 283-286, 378-381, 414-417, 520-523, 541-544, 546-549, 553-556, 564-567, and 579-582 of SEQ ID NO:56, and N-myristoylation sites at amino acid residues 31-36, 76-81, 83-88, 89-94, 142-147, 176-181, 191-196, 199-204, 407-412, 450-455, 477-482, 590-595, and 606-611 of SEQ ID NO:56.

[3092] Searches of the amino acid sequences of human 54414 and human 53763 were also performed against the ProDom database. A potassium ionic calcium activated domain and two potassium ionic subunits were identified in the amino acid sequence of 54414 (SEQ ID NO:53). Several transmembrane domains and transport family domains were identified in the amino acid sequence of 53763 (SEQ ID NO:56).

[3093] The amino acid sequences of human 54414 and human 53763 were further analyzed for the presence of a “pore domain”, also known as a “P-region domain”. A pore domain was identified in the amino acid sequence of human 54414 at about residues 229-250 of SEQ ID NO:53. A pore domain was identified in the amino acid sequence of human 53763 at about residues 426-441 of SEQ ID NO:56.

[3094] The amino acid-sequences of human 54414 and human 53763 were also analyzed for the presence of a “potassium channel signature sequence motif” (see Joiner, W. J. et al. (1998) Nat. Neurosci. 1:462-469 and references cited therein). A potassium channel signature sequence motif was identified in the amino acid sequence of human 54414 at about residues 239-246 of SEQ ID NO:53. A potassium channel signature sequence motif was identified in the amino acid sequence of human 53763 at about residues 436-441 of SEQ ID NO:56.

[3095] The amino acid sequence of human 53763 was also analyzed for the presence of a “voltage sensor motif”. A voltage sensor motif was identified in the amino acid sequence of human 53763 at about residues 348-363 of SEQ ID NO:56. Positively charged amino acid residues in the voltage sensor motif were identified about residues 348, 351, 354, 357, 360, and 363 of SEQ ID NO:50.

[3096] Isolation of the Human 67076, 67102, 44181, 67084FL, or 67084alt cDNAs

[3097] The invention is based, at least in part, on the discovery of a human gene encoding novel polypeptides, referred to herein as human 67076, 67102, 44181, 67084FL, and 67084alt. The entire sequence of the human clone 67076 was determined and found to contain an open reading frame termed human “67076.” The nucleotide sequence of the human 67076 gene is set forth in FIGS. 63A-63H and in the Sequence Listing as SEQ ID NO:58. The amino acid sequence of the human 67076 expression product is set forth in FIGS. 63A-63H and in the Sequence Listing as SEQ ID NO:59. The 67076 polypeptide comprises 1129 amino acids. The coding region (open reading frame) of SEQ ID NO:58 is set forth as SEQ ID NO:60. Clone 67076, comprising the coding region of human 67076, was deposited with the American Type Culture Collection (ATCC®), 10801 University Boulevard, Manassas, Va. 20110-2209, on ______, and assigned Accession No. ______.

[3098] The entire sequence of the human clone 67102 as determined and found to contain an open reading frame termed human “67102.” The nucleotide sequence of the human gene is set forth in FIGS. 67A-67I and in the Sequence Listing as SEQ ID NO:61. The amino acid sequence of the human 67102 expression product is set forth in FIGS. 67A-67I and in the Sequence Listing as SEQ ID NO:62. The 67102 polypeptide comprises 1426 amino acids. The coding region (open reading frame) of SEQ ID NO:61 is set forth as SEQ ID NO:63. Clone 67102, comprising the coding region of human 67102, was deposited with the American Type Culture Collection (ATCC®), 10801 University Boulevard, Manassas, Va. 20110-2209, on ______, and assigned Accession No. ______.

[3099] The entire sequence of the human clone 44181 was determined and found to contain an open reading frame termed human “44181.” The nucleotide sequence of the human 44181 gene is set forth in FIGS. 71A-71J and in the Sequence Listing as SEQ ID NO:64. The amino acid sequence of the human 44181 expression product is set forth in FIGS. 71A-71H and in the Sequence Listing as SEQ ID NO:65. The 44181 polypeptide comprises 1177 amino acids. The coding region (open reading frame) of SEQ ID NO:64 is set forth as SEQ ID NO:66. Clone 44181, comprising the coding region of human 44181, was deposited with the American Type Culture Collection (ATCC®), 10801 University Boulevard, Manassas, Va. 20110-2209, on ______, and assigned Accession No. ______.

[3100] The entire sequence of the human clone 67084FL was determined and found to contain an open reading frame termed human “67084FL.” The nucleotide sequence of the human 67084FL gene is set forth in FIGS. 75A-75G and in the Sequence Listing as SEQ ID NO:67. The amino acid sequence of the human 67084FL expression product is set forth in FIGS. 75A-75G and in the Sequence Listing as SEQ ID NO:68. The 67084FL polypeptide comprises 1084 amino acids. The coding region (open reading frame) of SEQ ID NO:67 is set forth as SEQ ID NO:69. Clone 67084FL, comprising the coding region of human 67084FL, was deposited with the American Type Culture Collection (ATCC®), 10801 University Boulevard, Manassas, Va. 20110-2209, on ______, and assigned Accession No. ______.

[3101] The entire sequence of the human clone 67084alt was determined and found to contain an open reading frame termed human “67084alt.” The nucleotide sequence of the human 67084alt gene is set forth in FIGS. 79A-79G and in the Sequence Listing as SEQ ID NO:70. The amino acid sequence of the human 67084alt expression product is set forth in FIGS. 79A-79G and in the Sequence Listing as SEQ ID NO:71. The 67084alt polypeptide comprises 1095 amino acids. The coding region (open reading frame) of SEQ ID NO:70 is set forth as SEQ ID NO:72. Clone 67084alt, comprising the coding region of human 67084alt, was deposited with the American Type Culture Collection (ATCC®), 10801 University Boulevard, Manassas, Va. 20110-2209, on ______, and assigned Accession No. ______.

[3102] Analysis of the Human 67076, 67102, 44181, 67084FL, or 67084alt Molecules

[3103] The amino acid sequences of human 67076, 67102, 44181, 67084FL, or 67084alt were analyzed for the presence of sequence motifs specific for P-type ATPases (as defined in Tang, X. et al. (1996) Science 272:1495-1497 and Fagan, M. J. and Saier, M. H. (1994) J. Mol. Evol. 38:57).

[3104] These analyses resulted in the identification of a P-type ATPase sequence I motif in the amino acid sequence of human 67076 at residues 173-181 of SEQ ID NO:59, in the amino acid sequence of human 67102 at residues 208-216 of SEQ ID NO:62, in the amino acid sequence of human 44181 at residues 173-181 of SEQ ID NO:65, in the amino acid sequence of human 67084FL at residues 213-221 of SEQ ID NO:68, and in the amino acid sequence of human 67084alt at residues 213-221 of SEQ ID NO:71.

[3105] These analyses also resulted in the identification of a P-type ATPase sequence 2 motif in the amino acid sequence of human 67076 at residues 406-415 of SEQ ID NO:59, in the amino acid sequence of human 67102 at residues 435-444 of SEQ ID NO:62, in the amino acid sequence of human 44181 at residues 404-413 of SEQ ID NO:65, in the amino acid sequence of human 67084FL at residues 413-422 of SEQ ID NO:68, and in the amino acid sequence of human 67084alt at residues 413-422 of SEQ ID NO:71.

[3106] These analyses further resulted in the identification of a P-type ATPase sequence 3 motif in the amino acid sequence of human 67076 at residues 813-824 of SEQ ID NO:59, in the amino acid sequence of human 67102 at residues 1054-1064 of SEQ ID NO:62, in the amino acid sequence of human 44181 at residues 819-829 of SEQ ID NO:65, in the amino acid sequence of human 67084FL at residues 820-830 of SEQ ID NO:68, and in the amino acid sequence of human 67084alt at residues 820-830 of SEQ ID NO:71.

[3107] The amino acid sequences of human 67076, 67102, 44181, 67084FL, and 67084alt were also analyzed for the presence of phospholipid transporter specific amino acid residues (as defined in Tang, X. et al. (1996) Science 272:1495-1497). These analyses also resulted in the identification of phospholipid transporter specific amino acid residues in the amino acid sequence of human 67076 at residues 174, 177, 407, 813, 823, and 824 of SEQ ID NO:59. These analyses resulted in the identification of phospholipid transporter specific amino acid residues 208, 209, 212, 436, 1054, 1063, and 1064 in the amino acid sequence of human 67102 at residues of SEQ ID NO:62. These analyses further resulted in the identification of phospholipid transporter specific amino acid residues 174, 177, 405, 819, 928, and 929 in the amino acid sequence of human 44181 at residues of SEQ ID NO:65. These analyses further resulted in the identification of phospholipid transporter specific amino acid residues 214, 217, 820, 829, and 830 in the amino acid sequence of human 67084FL at residues of SEQ ID NO:68. These analyses still further resulted in the identification of phospholipid transporter specific amino acid residues 214, 217, 820, 829, and 830 in the amino acid sequence of human 67084alt at residues of SEQ ID NO:71.

[3108] The amino acid sequences of human 67076, 67102, 44181, 67084FL, and 67084alt were also analyzed for the presence of extramembrane domains. An N-terminal large extramembrane domain was identified in the amino acid sequence of human 67076 at residues 105-291 of SEQ ID NO:59. A C-terminal large extramembrane domain was identified in the amino acid sequence of human 67076 at residues 366-872 of SEQ ID NO:59. An N-terminal large extramembrane domain was identified in the amino acid sequence of human 67102 at residues 141-321 of SEQ ID NO:62. A C-terminal large extramembrane domain was identified in the amino acid sequence of human 67102 at residues 391-581 of SEQ ID NO:62. An N-terminal large extramembrane domain was identified in the amino acid sequence of human 44181 at residues 105-289 of SEQ ID NO:65. A C-terminal large extramembrane domain was identified in the amino acid sequence of human 44181 at residues 364-877 of SEQ ID NO:65. An N-terminal large extramembrane domain was identified in the amino acid sequence of human 67084FL at residues 145-330 of SEQ ID NO:68. A C-terminal large extramembrane domain was identified in the amino acid sequence of human 67084FL at residues 380-886 of SEQ ID NO:68. An N-terminal large extramembrane domain was identified in the amino acid sequence of human 67084alt at residues 145-330 of SEQ ID NO:71. A C-terminal large extramembrane domain was identified in the amino acid sequence of human 67084alt at residues 380-886 of SEQ ID NO:71.

[3109] The amino acid sequence of human 67076 was analyzed using the program PSORT to predict the localization of the proteins within the cell. This program assesses the presence of different targeting and localization amino acid sequences within the query sequence. The results of this analysis predict that human 67076 may be localized to the endoplasmic reticulum.

[3110] Searches of the amino acid sequence of human 67076 were further performed against the Prosite database. These searches resulted in the identification in the amino acid sequence of human 67076 of a number of potential N-glycosylation sites at amino acid residues121-124, 392-395, 761-764, 992-995, and 1098-1101 of SEQ ID NO:59, a number of potential cAMP-and cGMP-dependent protein kinase phosphorylation sites at amino acid residues135-138, 545-548, 1091-1094, and 1102-1105 of SEQ ID NO:59, a number of potential protein kinase C phosphorylation sites at amino acid residues 47-49, 138-140, 204-206, 250-252, 254-256, 278-280, 308-310, 328-330, 334-336, 408-410, 680-682, 701-703, 708-710, 733-735, 736-738, 1008-1010, 1094-1096, 1100-1102, 1109-1111, and 1113-1115 of SEQ ID NO:59, a number of casein kinase II phosphorylation sites at amino acid residues 30-33, 264-267, 282-285, 328-331, 413-416, 442-445, 449-452, 494-497, 646-649, 693-696, 704-707, 762-765, 813-816, 924-927, 982-985, and 1121-1124 of SEQ ID NO:59, a number of potential tyrosine kinase phosphorylation sites at amino acid residues 252-258, 739-747 of SEQ ID NO:59, a number of N-myristoylation sites at amino acid residues 388-393, 440-445, 482-487, 514-519, 564-569, 753-758, and 807-812 of SEQ ID NO:59, an ATP/GTP-binding site motif (P-loop) at amino acid residues 271-278 of SEQ ID NO:59, and an E1-E2 ATPases phosphorylation site at amino acid residues 409-415 of SEQ ID NO:59.

[3111] A MEMSAT analysis of the polypeptide sequence of SEQ ID NO:59 was also performed, predicting three potential transmembrane domains in the amino acid sequence of human 67076 (SEQ ID NO:59). However, a structural, hydrophobicity, and antigenicity analysis (FIG. 64) resulted in the identification of ten transmembrane domains. Accordingly, the 67076 protein of SEQ ID NO:59 is predicted to have at least ten transmembrane domains, identified as transmembrane (TM) domains 1 through 10, at about residues 57-77, 84-105, 292-313, 345-365, 863-883, 905-926, 956-977, 989-1009, 1021-1041, and 1060-1087.

[3112] A search using the polypeptide sequence of SEQ ID NO:59 was performed against the HMM database in PFAM resulting in the identification of a potential hydrolase domain in the amino acid sequence of human 67076 at about residues 403-837 of SEQ ID NO:59 (score=12.7).

[3113] A search of the amino acid sequence of human 67076 was also performed against the ProDom database resulting in the identification of several hydrolase domains and phosphorylation domains in the amino acid sequence of 67076 (SEQ ID NO:59).

[3114] The amino acid sequence of human 67102 was analyzed using the program PSORT. The results of this analysis predict that human 67102 may be localized to the endoplasmic reticulum.

[3115] Searches of the amino acid sequence of human 67102 were further performed against the Prosite database. These searches resulted in the identification in the amino acid sequence of human 67102 of a number of potential N-glycosylation sites at amino acid residues 29-32, 303-306, 1365-1368, and 1397-1400 of SEQ ID NO:62, a glycosaminoglycan attachment site at amino acid residues 526-529 of SEQ ID NO:62, a number of potential cAMP- and cGMP-dependent protein kinase phosphorylation sites at amino acid residues 38-41, 451-545, 635-638, and 777-780 of SEQ ID NO:62, a number of protein kinase C phosphorylation sites at amino acid residues 47-49, 78-80, 161-163, 240-242, 262-264, 280-282, 437-439, 500-502, 563-565, 633-635, 644-646, 695-697, 743-745, 774-776, 827-829, 1000-1002, 1360-1362, and 1371-1373 of SEQ ID NO:62, a number of potential casein kinase II phosphorylation sites at amino acid residues 20-23, 161-164, 176-179, 184-187, 199-202, 210-213, 232-235, 241-244, 262-265, 312-315, 345-348, 405-408, 442-445, 471-474, 477-480, 543-546, 621-624, 644-647, 670-673, 693-696, 727-730, 850-853, 866-869, 892-895, 977-980, 1074-1077, 1141-1144, 1199-1202, 1221-1224, 1339-1342, 1399-1402, and 1403-1406 of SEQ ID NO:62, two tyrosine kinase phosphorylation sites at amino acid residues 21-28 and 847-854 of SEQ ID NO:62, a number of potential N-myristoylation sites at amino acid residues 69-74, 341-346, 488-493, 510-515, 519-524, 525-530, 651-656, 703-708, 714-719, 901-906, 955-960, 992-997, 1070-1075, 1139-1144, 1229-1234, and 1261-1266 of SEQ ID NO:62, two potential amidation sites at amino acid residues 36-39 and 1371-1374 of SEQ ID NO:62, two ATP/GTP-binding site motif A (P-loop) at amino acid residues 996-1003 and 1364-1371, an E1-E2 ATPases phosphorylation site at amino acid residues 438-444 of SEQ ID NO:62, and a prokaryotic membrane lipoprotein lipid attachment site at amino acid residues 26-36 of SEQ ID NO:62.

[3116] A MEMSAT analysis of the polypeptide sequence of SEQ ID NO:62 was also performed, predicting ten potential transmembrane domains in the amino acid sequence of human 67102 (SEQ ID NO:62) at about residues 98-115, 122-140, 322-344, 366-390, 582-601, 752-770, 1145-1166, 1225-1246, 1253-1276, and 1298-1317.

[3117] A search using the polypeptide sequence of SEQ ID NO:62 was performed against the HMM database in PFAM resulting in the identification of a potential hydrolase domain in the amino acid sequence of human 67102 at about residues 432-1077 of SEQ ID NO:62 (score=1.5), and the identification of a potential DUF6 domain in the amino acid sequence of human 67102 at about residues 1127-1271 of SEQ ID NO:62 (score=−24.6).

[3118] A search of the amino acid sequence of human 67102 was also performed against the ProDom database resulting in the identification of several hydrolase domains and phosphorylation domains in the amino acid sequence of 667102 (SEQ ID NO:62).

[3119] The amino acid sequence of human 44181 was analyzed using the program PSORT. The results of this analysis predict that human 44181 may be localized to the endoplasmic reticulum.

[3120] Searches of the amino acid sequence of human 44181 were further performed against the Prosite database. These searches resulted in the identification in the amino acid sequence of human 44181 of a number of potential N-glycosylation sites at amino acid residues 331-334, 390-393, 449-452, 461-464, 477-480, 786-789, and 998-1001 of SEQ ID NO:65, a number of potential cAMP- and cGMP-dependent protein kinase phosphorylation sites at amino acid residues 577-580, 633-636, and 750-753 of SEQ ID NO:65, a number of protein kinase C phosphorylation sites at amino acid residues 46-48, 163-165, 276-278, 332-334, 406-408, 470-472, 574-576, 636-638, 957-959, 1014-1016, and 1102-1104 of SEQ ID NO:65, a number of potential casein kinase C phosphorylation sites at amino acid residues 115-118, 262-265, 280-283, 411-414, 473-476, 520-523, 527-530, 636-639, 678-681, 737-740, 906-909, 929-932, 1100-1103, 1154-1157, and 1170-1173 of SEQ ID NO:65, a potential tyrosine kinase phosphorylation site at amino acid residues 316-322 of SEQ ID NO:65, a number of potential N-myristoylation sites at amino acid residues 131-136, 596-601, 766-771, and 993-998 of SEQ ID NO:65, and an E1-E2 ATPases phosphorylation site at amino acid residues 407-413 of SEQ ID NO:65.

[3121] A MEMSAT analysis of the polypeptide sequence of SEQ ID NO:65 was also performed, predicting three potential transmembrane domains in the amino acid sequence of human 44181 (SEQ ID NO:65). However, a structural, hydrophobicity, and antigenicity analysis (FIG. 72) resulted in the identification of ten transmembrane domains. Accordingly, the 44181 protein (SEQ ID NO:65) is predicted to have at least ten transmembrane domains, which are identified as transmembrane (TM) domains 1 through 10, at about residues 56-72, 87-103, 290-311, 343-363, 878-898, 911-931, 961-982, 995-1015, 1027-1047, and 1062-1086.

[3122] A search using the polypeptide sequence of SEQ ID NO:65 was performed against the HMM database in PFAM resulting in the identification of a potential E1-E2 ATPase domain in the amino acid sequence of human 44181 at about residues 126-164 of SEQ ID NO:65 (score=8.6), the identification of a potential DUF132 domain in the amino acid sequence of human 44181 at about residues 579-719 of SEQ ID NO:65 (score=−72.9), and the identification of a potential hydrolase domain in the amino acid sequence of human 44181 at about residues 401-842 of SEQ ID NO:65 (score=42.8).

[3123] A search of the amino acid sequence of human 44181 was also performed against the ProDom database A search of the amino acid sequence of human 44181 was also performed against the ProDom database resulting in the identification of several hydrolase domains and phosphorylation domains in the amino acid sequence of 44181 (SEQ ID NO:65).

[3124] A Clustal W (1.74) alignment of the amino acid sequence of human 44181 (SEQ ID NO:65) and human potential phospholipid-transporting ATPase IR (ATIR; GenBank Accession No.:Q9Y2G3) revealed some sequence homology between 44181 and Accession No.:Q9Y2G3.

[3125] The amino acid sequence of human 67084FL was analyzed using the program PSORT. The results of this analysis predict that human 67084FL may be localized to the endoplasmic reticulum.

[3126] Searches of the amino acid sequence of human 67084FL were further performed against the Prosite database. These searches resulted in the identification in the amino acid sequence of human 67084FL of a number of potential N-glycosylation sites at amino acid residues 310-313, 464-467, and 529-532 of SEQ ID NO:68, a potential cAMP- and cGMP-dependent protein kinase phosphorylation site at amino acid residues 1071-1074 of SEQ ID NO:68, a number of protein kinase C phosphorylation sites 82-84, 168-170, 204-206, 301-303, 371-373, 415-417, 486-488, 585-587, 666-668, 744-746, 800-802, 813-815, 872-874, 957-959, and 1009-1011 of SEQ ID NO:68, a number of potential casein kinase II phosphorylation sites at amino acid residues 265-268, 301-304, 402-405, 422-425, 535-538, 596-599, 661-664, 686-689, and 745-748 of SEQ ID NO:68, a tyrosine kinase phosphorylation site at amino acid residues 813-816 of SEQ ID NO:68, a number of potential N-myristoylation sites at amino acid residues 292-297, 462-467, 568-573, 606-611, 824-829, 887-892, and 1026-1031 of SEQ ID NO:68, a potential amidation site at amino acid residues 813-816 of SEQ ID NO:68, a prokaryotic membrane lipoprotein lipid attachment site at amino acid residues 105-115, a leucine zipper pattern at amino acid residues 325-346, and an E1-E2 ATPases phosphorylation site at amino acid residues 416-422 of SEQ ID NO:68.

[3127] A MEMSAT analysis of the polypeptide sequence of SEQ ID NO:68 was also performed, predicting nine potential transmembrane domains in the amino acid sequence of human 67084FL (SEQ ID NO:68). However, a structural, hydrophobicity, and antigenicity analysis (FIG. 76) resulted in the identification of ten transmembrane domains. Accordingly, the 67084FL protein of SEQ ID NO:68 is predicted to have at least ten transmembrane domains, which are identified as transmembrane (TM) domains 1 through 10, at about residues 104-120, 124-144, 331-350, 357-374, 887-903, 912-931, 961-983, 990-1008, 1015-1035, and 1043-1067.

[3128] A search using the polypeptide sequence of SEQ ID NO:68 was performed against the HMM database in PFAM resulting in the identification of two potential E1-E2 ATPase in the amino acid sequence of human 67084FL at about residues 171-199 of SEQ ID NO:68 (score=3.0) and 277-305 of SEQ ID NO:68 (score=13.0), and a hydrolase domain at about residues 410-843 of SEQ ID NO:68 (score=19.2).

[3129] A search of the amino acid sequence of human 67084FL was also performed against the ProDom database resulting in the identification of several hydrolase domains, phosphorylation domains, and ATPase domains in the amino acid sequence of 67084FL (SEQ ID NO:68).

[3130] A Clustal W (1.74) alignment of the amino acid sequence of human 67084FL (SEQ ID NO:68) and human membrane transport protein (MTRP-1; GenBank Accession No.:Y71056, International Publication No. WO 2000/26245-A2) revealed some sequence homology between 67084FL and Accession No.: Y71056.

[3131] The amino acid sequence of human 67084alt was analyzed using the program PSORT. The results of this analysis predict that human 67084alt may be localized to the endoplasmic reticulum.

[3132] Searches of the amino acid sequence of human 67084alt were further performed against the Prosite database. These searches resulted in the identification in the amino acid sequence of human 67084alt of a number of potential N-glycosylation sites at amino acid residues 310-313, 464-467, and 529-532 of SEQ ID NO:71, a potential cAMP- and cGMP-dependent protein kinase phosphorylation site at amino acid residues 1083-1086, a number of protein kinase C phosphorylation sites at amino acid residues 82-84, 168-170, 204-2-6, 301-303, 371-373, 415-417, 486-488, 585-587, 666-668, 744-746, 800-802, 813-815, 872-874, 957-959, and 1009-1011 of SEQ ID NO:71, a number of potential casein kinase II phosphorylation sites at amino acid residues 265-268, 301-304, 402-405, 422-445, 535-538, 596-599, 661-664, 686-689, and 745-748 of SEQ ID NO:71, a tyrosine kinase phosphorylation site at amino acid residues 641-648, a number of potential N-myristoylation sites at amino acid residues 292-297, 462-467, 568-573, 606-611, 824-829, 887-892, and 1026-1031 of SEQ ID NO:71, a potential amidation site at amino acid residues 813-816 of SEQ ID NO:71, a potential prokaryotic membrane lipoprotein lipid attachment site at amino acid residues 105-115 of SEQ ID NO:71, a leucine zipper pattern at amino acid residues 325-346 of SEQ ID NO:71, and an E1-E2 ATPases phosphorylation site at amino acid residues 416-422 of SEQ ID NO:71.

[3133] A MEMSAT analysis of the polypeptide sequence of SEQ ID NO:71 was also performed, predicting nine potential transmembrane domains in the amino acid sequence of human 67084alt (SEQ ID NO:71). However, a structural, hydrophobicity, and antigenicity analysis (FIG. 80) resulted in the identification of ten transmembrane domains. Accordingly, the 67084alt protein of SEQ ID NO:71 is predicted to have at least ten transmembrane domains, which are identified as transmembrane (TM) domains 1 through 10, at about residues 104-120, 124-144, 331-350, 357-374, 887-903, 912-931, 961-983, 990-1008, 1015-1035, and 1043-1067.

[3134] A search using the polypeptide sequence of SEQ ID NO:71 was performed against the HMM database in PFAM resulting in the identification of two potential E1-E2 ATPase in the amino acid sequence of human 67084alt at about residues 42-70 of SEQ ID NO:71 (score=3.0) and 105-133 of SEQ ID NO:71 (score=13.0), and a potential hydrolase domain at about amino acid residues 410-843 of SEQ ID NO:71 (score=19.2).

[3135] A search of the amino acid sequence of human 67084alt was also performed against the ProDom database resulting in the identification of several hydrolase domains, phosphorylation domains, and ATPase domains in the amino acid sequence of 67084alt (SEQ ID NO:71).

[3136] A Clustal W (1.74) alignment of the amino acid sequence of human 67084alt (SEQ ID NO:59) and human membrane transport protein (MTRP-1; GenBank Accession No.:Y71056, International Publication No. WO 2000/26245-A2) revealed some sequence homology between 67084alt and Accession No.: Y71056.

### Example 2

### Tissue Expression of Human 8099, 46455, 54414, 53763, 67076, 67102, 44181, Full Length 67084 (67084FL), and 67084alt mRNA

[3137] Tissue Distribution of Human 8099, 46455, 54414, 53763, 67076, 67102, 44181, 67084FL, and 67084alt mRNA Using Taqman™ Analysis

[3138] This example describes the tissue distribution of human 8099, 46455, 54414, 53763, 67076, 67102, 44181, 67084FL, or 67084alt mRNA in a variety of cells and tissues, as determined using the TaqMan™ procedure. The Taqman™ procedure is a quantitative, reverse transcription PCR-based approach for detecting mRNA. The RT-PCR reaction exploits the 5′ nuclease activity of AmpliTaq Gold™ DNA Polymerase to cleave a TaqMan™ probe during PCR. Briefly, cDNA was generated from the samples of interest, e.g., lung, ovary, colon, and breast normal and tumor samples, and used as the starting material for PCR amplification. In addition to the 5′ and 3′ gene-specific primers, a gene-specific oligonucleotide probe (complementary to the region being amplified) was included in the reaction (i.e., the Taqman™ probe). The TaqMan™ probe includes the oligonucleotide with a fluorescent reporter dye covalently linked to the 5′ end of the probe (such as FAM (6-carboxyfluorescein), TET (6-carboxy-4,7,2′,7′-tetrachlorofluorescein), JOE (6-carboxy-4,5-dichloro-2,7-dimethoxyfluorescein), or VIC) and a quencher dye (TAMRA (6-carboxy-N,N,N′,N′-tetramethylrhodamine) at the 3′ end of the probe.

[3139] During the PCR reaction, cleavage of the probe separates the reporter dye and the quencher dye, resulting in increased fluorescence of the reporter. Accumulation of PCR products is detected directly by monitoring the increase in fluorescence of the reporter dye. When the probe is intact, the proximity of the reporter dye to the quencher dye results in suppression of the reporter fluorescence. During PCR, if the target of interest is present, the probe specifically anneals between the forward and reverse primer sites. The 5′-3′ nucleolytic activity of the AmpliTaq™ Gold DNA Polymerase cleaves the probe between the reporter and the quencher only if the probe hybridizes to the target. The probe fragments are then displaced from the target, and polymerization of the strand continues. The 3′ end of the probe is blocked to prevent extension of the probe during PCR. This process occurs in every cycle and does not interfere with the exponential accumulation of product. RNA was prepared using the trizol method and treated with DNase to remove contaminating genomic DNA. cDNA was synthesized using standard techniques. Mock cDNA synthesis in the absence of reverse transcriptase resulted in samples with no detectable PCR amplification of the control gene confirms efficient removal of genomic DNA contamination.

[3140] Tissue Distribution of Human 8099

[3141] A human tissue panel was tested revealing highest expression of human 8099 mRNA in congestive heart failure (CHF) heart, normal prostate, and brain (see Table 1, below).

TABLE 1

| | | β 2 | | |
|---|---|---|---|---|
| Tissue Type | Mean | Mean | ∂∂ Ct | Expression |
| Artery normal | 30.83 | 22.31 | 8.52 | 2.7241 |
| Aorta diseased | 32.77 | 22.32 | 10.45 | 0.7149 |
| Vein normal | 29.41 | 20.23 | 9.18 | 1.724 |
| Coronary SMC | 31.2 | 20.91 | 10.3 | 0.7932 |
| HUVEC | 32.16 | 21.38 | 10.78 | 0.5687 |
| Hemangioma | 32.86 | 19.66 | 13.21 | 0.1059 |
| Heart normal | 28.05 | 20.43 | 7.62 | 5.0834 |
| Heart CHF | 26.98 | 20.68 | 6.3 | 12.6914 |
| Kidney | 27.76 | 20.45 | 7.3 | 6.3238 |
| Skeletal Muscle | 29.7 | 22.17 | 7.53 | 5.4294 |
| Adipose normal | 34.16 | 20.59 | 13.56 | 0.0828 |
| Pancreas | 33.23 | 22.29 | 10.94 | 0.5108 |
| primary osteoblasts | 32 | 20.61 | 11.39 | 0.3726 |
| Osteoclasts (diff) | 30.9 | 17.55 | 13.35 | 0.0958 |
| Skin normal | 34.12 | 22.45 | 11.68 | 0.3058 |
| Spinal cord normal | 31.93 | 21.07 | 10.87 | 0.5362 |
| Brain Cortex normal | 28.4 | 22.34 | 6.06 | 14.9885 |
| Brain Hypothalamus normal | 29.68 | 22.35 | 7.34 | 6.1936 |
| Nerve | 32.96 | 22.25 | 10.72 | 0.5949 |
| DRG (Dorsal Root Ganglion) | 30.81 | 22.15 | 8.65 | 2.4808 |
| Breast normal | 31.91 | 21.14 | 10.77 | 0.5747 |
| Breast tumor | 32.73 | 20.93 | 11.81 | 0.2785 |
| Ovary normal | 30.41 | 19.82 | 10.6 | 0.6465 |
| Ovary Tumor | 28.36 | 19.06 | 9.31 | 1.5755 |
| Prostate Normal | 27.29 | 19.77 | 7.52 | 5.4482 |

[3142] Tissue Distribution of Human 46455

[3143] A human vessel and tissue panel was tested revealing highest expression of human 46455 mRNA in human umbilical vein endothelial cells (HUVEC), erythroid cells, normal artery, megakaryocytes, kidney, and CHF heart. 46455 was expressed at higher levels in lung tumor, breast tumor, and colon tumor versus normal lung, breast and colon tissues, indicating a possible role for 46455 in cellular proliferation disorders (see Table 2, below).

TABLE 2

| Tissue Type | Mean | β 2 Mean | ∂∂ Ct | Expression |
|---|---|---|---|---|
| Artery normal | 28.05 | 24.09 | 2.67 | 157.6722 |
| Aorta diseased | 28.75 | 23.66 | 3.79 | 72.0429 |
| Vein normal | 27.75 | 21.72 | 4.75 | 37.1627 |
| Coronary SMC | 28.2 | 25.12 | 1.78 | 290.176 |
| HUVEC | 24.18 | 22.59 | 0.29 | 817.9021 |
| Hemangioma | 25.15 | 20.98 | 2.88 | 135.8419 |
| Heart normal | 26.44 | 21.82 | 3.33 | 99.4421 |
| Heart CHF | 25.54 | 21.09 | 3.15 | 112.6563 |
| Kidney | 25.98 | 21.49 | 3.2 | 108.8188 |
| Skeletal Muscle | 28.22 | 24.14 | 2.79 | 144.586 |
| Adipose normal | 28.38 | 22.21 | 4.88 | 33.9605 |
| Pancreas | 27.91 | 23.22 | 3.4 | 94.4045 |
| primary osteoblasts | 27.11 | 21.85 | 3.97 | 63.8133 |
| Osteoclasts (diff) | 23.64 | 18.8 | 3.55 | 85.3775 |
| Skin normal | 28.43 | 23.27 | 3.88 | 68.1567 |
| Spinal cord normal | 26.88 | 22.12 | 3.47 | 90.2456 |
| Brain Cortex normal | 26.42 | 23.4 | 1.73 | 301.452 |
| Brain Hypothalamus normal | 28.1 | 23.55 | 3.26 | 104.386 |
| Nerve | 28.59 | 23.88 | 3.43 | 92.7827 |
| DRG (Dorsal Root Ganglion) | 28.33 | 23.76 | 3.28 | 102.9489 |
| Breast normal | 27.31 | 22.32 | 3.7 | 76.9465 |
| Breast tumor | 26.47 | 22.11 | 3.07 | 119.0797 |
| Ovary normal | 26.59 | 22.16 | 3.13 | 113.8337 |
| Ovary Tumor | 28.47 | 21.84 | 5.33 | 24.8605 |
| Prostate Normal | 27.09 | 21.68 | 4.12 | 57.5117 |
| Prostate Tumor | 26.51 | 21.58 | 3.64 | 80.2141 |
| Salivary glands | 27.16 | 20.81 | 5.07 | 29.8733 |
| Colon normal | 26.3 | 20 | 5 | 31.1419 |
| Colon Tumor | 25.09 | 20.52 | 3.29 | 102.5927 |
| Lung normal | 26.02 | 19.75 | 4.98 | 31.6862 |
| Lung tumor | 25.09 | 21.31 | 2.48 | 178.6243 |
| Lung COPD | 25.26 | 19.71 | 4.26 | 52.193 |
| Colon IBD | 26.3 | 18.91 | 6.1 | 14.5786 |
| Liver normal | 27.66 | 21.8 | 4.57 | 42.101 |
| Liver fibrosis | 29.31 | 24.09 | 3.92 | 65.8351 |
| Spleen normal | 27.41 | 21.41 | 4.71 | 38.2075 |
| Tonsil normal | 25.23 | 19.32 | 4.63 | 40.5262 |
| Lymph node normal | 26.15 | 20.35 | 4.51 | 43.8889 |
| Small intestine normal | 28.23 | 21.73 | 5.22 | 26.8302 |
| Skin-Decubitus | 27.18 | 22.82 | 3.06 | 119.908 |
| Synovium | 28 | 21.12 | 5.59 | 20.6889 |
| BM-MNC | 26.13 | 19.32 | 5.51 | 21.9445 |
| Activated PBMC | 25.2 | 17.95 | 5.96 | 16.12 |
| Neutrophils | 24.45 | 19.5 | 3.65 | 79.66 |
| Megakaryocytes | 22.5 | 18.95 | 2.26 | 208.772 |
| Erythroid | 24.2 | 21.69 | 1.23 | 427.7975 |

[3144] Tissue Distribution of Human 53763

[3145] A human vessel and tissue panel was tested revealing highest expression of human 53763 mRNA in normal brain cortex, normal hypothalamus, prostate tumor, normal prostate, dorsal root ganglion, and normal breast tissue (see Table 3, below).

TABLE 3

| Tissue Type | Mean | β 2 Mean | ∂∂ Ct | Expression |
|---|---|---|---|---|
| Artery normal | 40 | 22.41 | 16.07 | 0 |
| Aorta diseased | 40 | 22.05 | 16.44 | 0 |
| Vein normal | 40 | 19.75 | 18.74 | 0 |
| Coronary SMC | 35.16 | 21.86 | 11.79 | 0 |
| HUVEC | 40 | 20.41 | 18.08 | 0 |
| Hemangioma | 40 | 18.52 | 19.96 | 0 |
| Heart normal | 39.43 | 19.55 | 18.37 | 0 |
| Heart CHF | 40 | 18.98 | 19.5 | 0 |
| Kidney | 39.44 | 19.76 | 18.16 | 0 |
| Skeletal Muscle | 38.97 | 21.57 | 15.89 | 0 |
| Adipose normal | 40 | 20.09 | 18.4 | 0 |
| Pancreas | 38.91 | 20.84 | 16.56 | 0 |
| primary osteoblasts | 40 | 19.87 | 18.61 | 0 |
| Osteoclasts (diff) | 40 | 17.09 | 21.4 | 0 |
| Skin normal | 39.59 | 21.22 | 16.86 | 0 |
| Spinal cord normal | 31.72 | 20.14 | 10.07 | 0.9303 |
| Brain Cortex normal | 23.07 | 21.56 | 0.01 | 996.5403 |
| Brain Hypothalamus normal | 26.15 | 20.98 | 3.65 | 79.3844 |
| Nerve | 39.08 | 21.23 | 16.33 | 0 |
| DRG (Dorsal Root Ganglion) | 31.66 | 21.3 | 8.86 | 2.1596 |
| Breast normal | 27.25 | 20.41 | 5.33 | 24.9468 |
| Breast tumor | 40 | 20.02 | 18.46 | 0 |
| Ovary normal | 40 | 19.66 | 18.83 | 0 |
| Ovary Tumor | 40 | 19.7 | 18.79 | 0 |
| Prostate Normal | 29.68 | 19.32 | 8.85 | 2.1671 |
| Prostate Tumor | 28.14 | 19.95 | 6.67 | 9.8204 |
| Salivary glands | 40 | 18.97 | 19.52 | 0 |
| Colon normal | 39.09 | 17.8 | 19.78 | 0 |
| Colon Tumor | 40 | 18.63 | 19.86 | 0 |
| Lung normal | 40 | 17.49 | 21 | 0 |
| Lung tumor | 39.66 | 19.81 | 18.34 | 0 |
| Lung COPD | 40 | 17.97 | 20.52 | 0 |
| Colon IBD | 40 | 17.3 | 21.18 | 0 |
| Liver normal | 40 | 19.57 | 18.91 | 0 |
| Liver fibrosis | 40 | 21.34 | 17.15 | 0 |
| Spleen normal | 40 | 19.27 | 19.22 | 0 |
| Tonsil normal | 33.5 | 16.75 | 15.24 | 0.0258 |
| Lymph node normal | 38.61 | 18.4 | 18.7 | 0 |
| Small intestine normal | 36.56 | 19.96 | 15.08 | 0 |
| Skin-Decubitus | 39.43 | 20.41 | 17.51 | 0 |
| Synovium | 40 | 19.32 | 19.16 | 0 |
| BM-MNC | 40 | 18.21 | 20.27 | 0 |
| Activated PBMC | 38.88 | 17.5 | 19.88 | 0 |
| Neutrophils | 40 | 18.38 | 20.11 | 0 |
| Megakaryocytes | 40 | 18.09 | 20.39 | 0 |
| Erythroid | 40 | 21.23 | 17.25 | 0 |

[3146] Tissue Distribution of Human 67076

[3147] A human vessel panel was tested revealing highest expression of human 67076 mRNA in nornal aorta, diseased artery, and static HUVEC (see Table 4, below).

TABLE 4

| Tissue Type | Mean | β 2 Mean | ∂∂ Ct | Expression |
|---|---|---|---|---|
| Aortic SMC | 25.58 | 21.16 | 4.42 | 46.8762 |
| Coronary SMC | 29.11 | 24.36 | 4.76 | 36.906 |
| Huvec Static | 23.55 | 20.59 | 2.96 | 128.0696 |
| Huvec LSS | 23.41 | 20.06 | 3.35 | 98.073 |
| H/Adipose/MET 8 | 27.7 | 20.51 | 7.18 | 6.8723 |
| H/Artery/Normal/Carotid/CLN | 26.82 | 19.34 | 7.48 | 5.6014 |
| 595 | | | | |
| H/Artery/Normal/Carotid/CLN | 28.79 | 20.41 | 8.37 | 3.0226 |
| 598 | | | | |
| H/Artery/normal/NDR 352 | 29.41 | 21.68 | 7.73 | 4.7102 |
| H/IM Artery/Normal/AMC 73 | 32.65 | 23.77 | 8.88 | 2.1152 |
| H/Muscular Artery/Normal/ | 29.2 | 23.34 | 5.87 | 17.1577 |
| AMC 236 | | | | |
| H/Muscular Artery/Normal/ | 29.68 | 22.56 | 7.13 | 7.1393 |
| AMC 254/ | | | | |
| H/Muscular Artery/Normal/ | 29.63 | 22.25 | 7.37 | 6.0452 |
| AMC 259 | | | | |
| H/Muscular Artery/Normal/ | 30.12 | 22.67 | 7.45 | 5.7191 |
| AMC 261 | | | | |
| H/Muscular Artery/Normal/ | 30.2 | 24.2 | 6 | 15.6792 |
| AMC 275 | | | | |
| H/Aorta/Diseased/PIT 732 | 30.73 | 22.36 | 8.38 | 3.0121 |
| H/Aorta/Diseased/PIT 710 | 29.6 | 23.14 | 6.46 | 11.3199 |
| H/Aorta/Diseased/PIT 711 | 29.35 | 22.63 | 6.72 | 9.4531 |
| H/Aorta/Diseased/PIT 712 | 28.77 | 22.02 | 6.75 | 9.2585 |
| H/Artery/Diseased/iliac/NDR | 26.11 | 19.41 | 6.71 | 9.585 |
| 753 | | | | |
| H/Artery/Diseased/Tibial/PIT | 29.82 | 20.34 | 9.47 | 1.4101 |
| 679 | | | | |
| H/Vein/Normal/SaphenousAMC | 31.66 | 21.07 | 10.59 | 0.6488 |
| 107 | | | | |
| H/Vein/Normal/NDR 239 | 33.13 | 21.65 | 11.49 | 0.3477 |
| H/Vein/Normal/Saphenous/NDR | 29.71 | 20.59 | 9.12 | 1.7972 |
| 237 | | | | |
| H/Vein/Normal/PIT 1010 | 28.34 | 22.05 | 6.3 | 12.6914 |
| H/Vein/Normal/AMC 191 | 28.64 | 22.15 | 6.49 | 11.164 |
| H/Vein/Normal/AMC 130 | 27.41 | 21.27 | 6.14 | 14.1309 |
| H/Vein/Normal/AMC 188 | 30.56 | 24.09 | 6.46 | 11.3199 |
| H/Vein/Normal/AMC 196 | 29.89 | 20.93 | 8.96 | 2.008 |
| H/Vein/Normal/AMC 211 | 32.55 | 23.52 | 9.03 | 1.9196 |
| H/Vein/Normal/AMC 214 | 30.93 | 22.99 | 7.95 | 4.058 |
| M/Artery/Diseased/CAR 1174 | 24.56 | 23.05 | 1.5 | 352.3302 |
| M/Artery/Diseased/CAR 1175 | 24.98 | 19.89 | 5.09 | 29.2585 |
| M/Aorta/Normal/PRI 286 | 25.52 | 18.68 | 6.84 | 8.7288 |
| M/Artery/Normal/PRI 324 | 25.13 | 20.65 | 4.48 | 44.8111 |
| M/Aorta/Normal/PRI 264 | 24.14 | 24.74 | −0.6 | 1515.7166 |
| M/Artery/Normal/PRI 320 | 24.93 | 20.29 | 4.64 | 40.1071 |
| M/Vein/Normal/PRI 328 | 26.67 | 20.04 | 6.63 | 10.0965 |
| HUVEC Vehicle | 26.64 | 21 | 5.63 | 20.1232 |
| HUVEC Mev | 25.54 | 20.3 | 5.25 | 26.3692 |
| HAEC Vehicle | 25.7 | 20.66 | 5.04 | 30.2903 |
| HAEC Mev | 27.84 | 22.41 | 5.43 | 23.1957 |

[3148] Tissue Distribution of Human 67102

[3149] A human tissue panel was tested revealing highest expression of human 67102 mRNA in normal kidney tissue and diseased artery (see Table 5, below).

TABLE 5

| Tissue Type | Mean | β 2 Mean | ∂∂ Ct | Expression |
|---|---|---|---|---|
| Aortic SMC | 28.34 | 21.88 | 6.47 | 11.2807 |
| Coronary SMC | 29.98 | 23.11 | 6.88 | 8.5196 |
| Huvec Static | 27.55 | 21.41 | 6.14 | 14.18 |
| Huvec LSS | 27.72 | 21.12 | 6.59 | 10.3444 |
| H/Adipose/MET 8 | 30.56 | 20.57 | 9.99 | 0.9834 |
| H/Artery/Normal/Carotid/CLN | 31.42 | 20.3 | 11.13 | 0.4478 |
| 595 | | | | |
| H/Artery/Normal/Carotid/CLN | 32.23 | 21.69 | 10.54 | 0.6717 |
| 598 | | | | |
| H/Artery/normal/NDR 352 | 31.34 | 22.44 | 8.9 | 2.0933 |
| H/IM Artery/Normal/AMC 73 | 33.46 | 23.98 | 9.48 | 1.4003 |
| H/Muscular Artery/Normal/ | 30.48 | 23.52 | 6.96 | 8.0321 |
| AMC 236 | | | | |
| H/Muscular Artery/Normal/ | 33.9 | 24.07 | 9.82 | 1.1025 |
| AMC 247 | | | | |
| H/Muscular Artery/Normal/ | 31.12 | 23.43 | 7.68 | 4.8594 |
| AMC 254/ | | | | |
| H/Muscular Artery/Normal/ | 30.47 | 23.07 | 7.4 | 5.9208 |
| AMC 259 | | | | |
| H/Muscular Artery/Normal/ | 31.32 | 22.92 | 8.4 | 2.9501 |
| AMC 261 | | | | |
| H/Muscular Artery/Normal/ | 31.31 | 24.78 | 6.53 | 10.8212 |
| AMC 275 | | | | |
| H/Aorta/Diseased/PIT 732 | 31.73 | 22.76 | 8.97 | 1.9942 |
| H/Aorta/Diseased/PIT 710 | 30.33 | 23.36 | 6.97 | 7.9767 |
| H/Aorta/Diseased/PIT 711 | 31.02 | 23.3 | 7.72 | 4.7265 |
| H/Aorta/Diseased/PIT 712 | 30.57 | 22.71 | 7.86 | 4.3043 |
| H/Artery/Diseased/iliac/NDR | 27.22 | 20.07 | 7.15 | 7.041 |
| 753 | | | | |
| H/Artery/Diseased/Tibial/PIT | 32 | 21.19 | 10.81 | 0.557 |
| 679 | | | | |
| H/Vein/Normal/SaphenousAMC | 31.57 | 22.08 | 9.49 | 1.3859 |
| 107 | | | | |
| H/Vein/Normal/NDR 239 | 33.44 | 22.16 | 11.28 | 0.4021 |
| H/Vein/Normal/Saphenous/NDR | 31.32 | 21.01 | 10.31 | 0.7877 |
| 237 | | | | |
| H/Vein/Normal/PIT 1010 | 29.86 | 22.36 | 7.5 | 5.5243 |
| H/Vein/Normal/AMC 191 | 30.36 | 22.53 | 7.84 | 4.3796 |
| H/Vein/Normal/AMC 130 | 30.08 | 22.32 | 7.75 | 4.6293 |
| H/Vein/Normal/AMC 188 | 32.93 | 25.01 | 7.92 | 4.129 |
| H/Vein/Normal/AMC 196 | 32.24 | 21.61 | 10.64 | 0.6288 |
| H/Vein/Normal/AMC 211 | 36.16 | 23.51 | 12.65 | 0 |
| H/Vein/Normal/AMC 214 | 35.59 | 24 | 11.6 | 0 |
| M/Artery/Diseased/CAR 1175 | 29.73 | 21.84 | 7.89 | 4.2011 |
| M/Aorta/Normal/543 | 34.84 | 29.17 | 5.67 | 19.6408 |
| M/Artery/Diseased/CAR 1174 | 31.11 | 26.59 | 4.52 | 43.5857 |
| M/Pancreas/PRI 2 | 32.48 | 26.33 | 6.15 | 14.082 |
| M/Kidney/Normal/MPI 88 | 30.23 | 26.84 | 3.38 | 96.0547 |
| M/Kidney/Normal/MPI 282 | 29.34 | 25.94 | 3.4 | 95.0612 |
| HUVEC Vehicle | 29.25 | 21.45 | 7.8 | 4.4871 |
| HUVEC Mev | 28.16 | 20.87 | 7.29 | 6.3899 |
| HAEC Vehicle | 28.14 | 21.16 | 6.97 | 7.9491 |
| HAEC Mev | 29.61 | 22.66 | 6.95 | 8.088 |

[3150] In addition, a human vessel panel was tested, which revealed high expression of human 67102 mRNA in normal artery, HUVEC, coronary smooth muscle cells, diseased aorta, and normal hypothalamus (see Table, 6, below).

TABLE 6

| Tissue Type | Mean | β 2 Mean | ∂∂ Ct | Expression |
|---|---|---|---|---|
| Artery normal | 27.32 | 21.75 | 5.57 | 21.0505 |
| Aorta diseased | 28.27 | 21.71 | 6.55 | 10.6353 |
| Vein normal | 30.38 | 19.83 | 10.55 | 0.6693 |
| Coronary SMC | 28.61 | 22.23 | 6.38 | 12.0485 |
| HUVEC | 26.32 | 20.32 | 6 | 15.5709 |
| Hemangioma | 25.91 | 19.07 | 6.83 | 8.7895 |
| Heart normal | 27.16 | 19.98 | 7.17 | 6.9441 |
| Heart CHF | 27.2 | 19.06 | 8.14 | 3.545 |
| Kidney | 25.54 | 19.59 | 5.96 | 16.12 |
| Skeletal Muscle | 30.52 | 21.5 | 9.03 | 1.9196 |
| Adipose normal | 30.11 | 19.95 | 10.15 | 0.8771 |
| Pancreas | 29.57 | 21.23 | 8.33 | 3.1076 |
| primary osteoblasts | 28.09 | 19.85 | 8.23 | 3.3191 |
| Osteoclasts (diff) | 29.79 | 17.02 | 12.77 | 0.1432 |
| Skin normal | 29.31 | 21.41 | 7.89 | 4.2011 |
| Spinal cord normal | 28.3 | 20.36 | 7.93 | 4.0863 |
| Brain Cortex normal | 28.25 | 22.04 | 6.21 | 13.5084 |
| Brain Hypothalamus normal | 28.93 | 21.49 | 7.44 | 5.7589 |
| Nerve | 28.34 | 21.3 | 7.04 | 7.5989 |
| DRG (Dorsal Root Ganglion) | 29.16 | 21.11 | 8.04 | 3.7994 |
| Breast normal | 27.81 | 20.47 | 7.34 | 6.1508 |
| Breast tumor | 29.08 | 20.41 | 8.68 | 2.4466 |
| Ovary normal | 26.44 | 19.7 | 6.74 | 9.3878 |
| Ovary Tumor | 30.93 | 19.6 | 11.34 | 0.3871 |
| Prostate Normal | 28.11 | 19.48 | 8.63 | 2.5241 |
| Prostate Tumor | 27.68 | 19.68 | 8 | 3.9063 |
| Salivary glands | 28.9 | 19.18 | 9.71 | 1.194 |
| Colon Tumor | 27.98 | 18.82 | 9.16 | 1.742 |
| Lung normal | 26.96 | 17.4 | 9.56 | 1.3202 |
| Lung tumor | 27.82 | 19.64 | 8.19 | 3.4361 |
| Lung COPD | 26.38 | 17.66 | 8.72 | 2.3633 |
| Colon IBD | 28.27 | 17.29 | 10.98 | 0.4934 |
| Liver normal | 29.14 | 19.58 | 9.56 | 1.3248 |
| Liver fibrosis | 29.89 | 21.08 | 8.8 | 2.2358 |
| Spleen normal | 26.95 | 19.09 | 7.86 | 4.3193 |
| Tonsil normal | 25.01 | 16.8 | 8.21 | 3.3654 |
| Lymph node normal | 26.3 | 18.22 | 8.09 | 3.6828 |
| Small intestine normal | 29.03 | 19.59 | 9.45 | 1.4347 |
| Skin-Decubitus | 27.66 | 20.32 | 7.34 | 6.1722 |
| Synovium | 28.22 | 19.23 | 8.98 | 1.9804 |
| BM-MNC | 29.57 | 18.46 | 11.12 | 0.4509 |
| Activated PBMC | 28.38 | 17.25 | 11.14 | 0.4447 |
| Neutrophils | 27.43 | 18.4 | 9.04 | 1.8997 |
| Megakaryocytes | 26.72 | 17.88 | 8.84 | 2.1822 |
| Erythroid | 31.52 | 21.26 | 10.26 | 0.8183 |
| Colon normal | 30.07 | 19.25 | 10.82 | 0.5551 |

[3151] Tissue Distribution of Human 44181

[3152] A human vessel panel was tested revealing highest expression of human 44181 mRNA in LSS HUVEC (see Table 7, below).

TABLE 7

| Tissue Type | Mean | β 2 Mean | ∂∂ Ct | Expression |
|---|---|---|---|---|
| Static Huvec | 25.37 | 19.18 | 6.19 | 13.697 |
| LSS Huvec | 25.7 | 20.02 | 5.68 | 19.4377 |
| Aortic SMC | 28.75 | 20.32 | 8.43 | 2.9095 |
| Coronary SMC | 28.52 | 21.2 | 7.31 | 6.3019 |
| H/Adipose/MET 9 | 36.07 | 18.41 | 17.66 | 0 |
| Diseased Heart/PIT 1 | 29.28 | 21.15 | 8.13 | 3.5697 |
| H/Artery/Normal/Carotid/CLN | 37.9 | 18.32 | 19.59 | 0 |
| 595 | | | | |
| H/Artery/Normal/Carotid/CLN | 39.97 | 19.49 | 20.48 | 0 |
| 598 | | | | |
| H/Artery/normal/NDR 352 | 40 | 20.2 | 19.8 | 0 |
| H/Artery/Normal/AMC 150 | 40 | 22.27 | 17.73 | 0 |
| H/Artery/Normal/AMC 73 | 40 | 23.84 | 16.16 | 0 |
| IMA/AMC 247 | 39.73 | 22.79 | 16.95 | 0 |
| IMA/AMC 254 | 33.79 | 22.23 | 11.56 | 0.3324 |
| IMA/AMC 259 | 33.68 | 21.12 | 12.56 | 0.1656 |
| IMA/AMC 261 | 34.73 | 21.23 | 13.5 | 0.0863 |
| IMA/AMC 275 | 40 | 24.52 | 15.48 | 0 |
| IMA/AMC 279 | 30.89 | 22.41 | 8.48 | 0 |
| H/Artery/Diseased/iliac/NDR | 36.59 | 18.43 | 18.16 | 0 |
| 753 | | | | |
| H/Artery/Diseased/Tibial/PIT | 40 | 19.84 | 20.16 | 0 |
| 679 | | | | |
| Aorta/Diseased/PIT 732 | 34.74 | 21.32 | 13.41 | 0.0916 |
| Aorta/Diseased/PIT 710 | 33.04 | 22.48 | 10.56 | 0.6624 |
| Aorta/Diseased/PIT 711 | 31.89 | 22.09 | 9.8 | 1.1218 |
| Aorta/Diseased/PIT 712 | 32.92 | 22.09 | 10.84 | 0.5474 |
| H/Vein/Normal/Saphenous/ | 32.66 | 16.82 | 15.83 | 0.0172 |
| NDR 721 | | | | |
| H/Vein/Normal/SaphenousAMC | 40 | 20 | 20 | 0 |
| 107 | | | | |
| H/Vein/Normal/NDR 239 | 40 | 20.61 | 19.39 | 0 |
| H/Vein/Normal/Saphenous/ | 40 | 19.1 | 20.9 | 0 |
| NDR 237 | | | | |
| H/Vein/Normal/NDR 235 | 40 | 21.34 | 18.66 | 0 |
| H/Vein/Normal/MPI 1101 | 33.56 | 19.59 | 13.98 | 0.0621 |
| HMVEC/Vehicle/24 hr | 30.04 | 17.84 | 12.2 | 0.2125 |
| HMVEC/Mev/24 hr/1X | 29.77 | 18 | 11.76 | 0.2883 |
| HMVEC/MEV/24 HR/2.5X | 30.32 | 18.67 | 11.65 | 0.3112 |
| HMVEC/MEV/48 HR/1X | 31.58 | 18.8 | 12.79 | 0.1417 |
| HMVEC/MEV/48 HR/2.5X | 31.77 | 18.37 | 13.4 | 0.0922 |
| HUVEC/Vehicle/24 hr | 30.5 | 18.15 | 12.36 | 0.1909 |
| HUVEC/Mev/24 hr/1X | 30.28 | 17.52 | 12.76 | 0.1442 |
| HUVEC/MEV/24 HR/2.5X | 29.35 | 19.18 | 10.18 | 0.865 |
| HUVEC/MEV/48 HR/1X | 35.68 | 21.54 | 14.14 | 0 |
| HUVEC/MEV/48 HR/2.5X | 34.7 | 23 | 11.7 | 0.3016 |

[3153] Tissue Distribution of Human 67084

[3154] A human vessel panel was tested revealing highest expression of human 67084 mRNA in HUVEC, LSS HUVEC, and coronary smooth muscle cells (see Table 8, below).

TABLE 8

| Tissue Type | Mean | β 2 Mean | ∂∂ Ct | Expression |
|---|---|---|---|---|
| Aortic SMC | 25.92 | 19.23 | 6.7 | 9.6517 |
| Coronary SMC | 26.59 | 20.36 | 6.23 | 13.3224 |
| Huvec Static | 23.39 | 18.5 | 4.88 | 33.843 |
| Huvec LSS | 24.31 | 18.32 | 5.99 | 15.7883 |
| H/Adipose/MET 9 | 26.4 | 18.46 | 7.94 | 4.0721 |
| H/Artery/Normal/Carotid/CLN | 26.83 | 18.84 | 8 | 3.9198 |
| 595 | | | | |
| H/Artery/Normal/Carotid/CLN | 28.49 | 20.16 | 8.34 | 3.0968 |
| 598 | | | | |
| H/Artery/normal/NDR 352 | 27.12 | 20.32 | 6.8 | 8.9432 |
| H/IM Artery/Normal/AMC 73 | 31.48 | 23.36 | 8.12 | 3.607 |
| H/Muscular Artery/Normal/ | 30.93 | 23.56 | 7.38 | 6.0243 |
| AMC 236 | | | | |
| H/Muscular Artery/Normal/ | 33.77 | 24.84 | 8.92 | 2.0645 |
| AMC 247 | | | | |
| H/Muscular Artery/Normal/ | 30.69 | 23.68 | 7 | 7.7855 |
| AMC 254/ | | | | |
| H/Muscular Artery/Normal/ | 29.9 | 22.12 | 7.78 | 4.5497 |
| AMC 259 | | | | |
| H/Muscular Artery/Normal/ | 29.93 | 21.13 | 8.8 | 2.2436 |
| AMC 261 | | | | |
| H/Muscular Artery/Normal/ | 30.29 | 22.97 | 7.33 | 6.2367 |
| AMC 275 | | | | |
| H/Aorta/Diseased/PIT 732 | 29.02 | 21.35 | 7.67 | 4.8932 |
| H/Aorta/Diseased/PIT 710 | 31.36 | 22.8 | 8.56 | 2.6496 |
| H/Aorta/Diseased/PIT 711 | 31.31 | 22.6 | 8.71 | 2.3963 |
| H/Aorta/Diseased/PIT 712 | 31.4 | 22.48 | 8.92 | 2.0645 |
| H/Artery/Diseased/iliac/NDR | 25.37 | 17.73 | 7.64 | 4.996 |
| 753 | | | | |
| H/Artery/Diseased/Tibial/PIT | 28.55 | 19.45 | 9.11 | 1.816 |
| 679 | | | | |
| H/Vein/Normal/SaphenousAMC | 29.48 | 21.11 | 8.38 | 3.0121 |
| 107 | | | | |
| H/Vein/Normal/Saphenous/NDR | 28.67 | 19.86 | 8.8 | 2.2358 |
| 237 | | | | |
| H/Vein/Normal/PIT 1010 | 28.31 | 20.55 | 7.76 | 4.5973 |
| H/Vein/Normal/AMC 191 | 29.25 | 20.77 | 8.47 | 2.8104 |
| H/Vein/Normal/AMC 130 | 28.32 | 20.45 | 7.88 | 4.2598 |
| H/Vein/Normal/AMC 188 | 31.68 | 24.61 | 7.06 | 7.4943 |
| H/Vein/Normal/NDR 239 | 35.65 | 29.23 | 6.42 | 0 |
| HUVEC Vehicle | 26.86 | 20.14 | 6.71 | 9.5188 |
| HUVEC Mev | 25.83 | 18.52 | 7.3 | 6.3238 |
| HAEC Vehicle | 26.57 | 19.64 | 6.94 | 8.1443 |
| HAEC Mev | 27.81 | 21.13 | 6.67 | 9.7864 |

### Example 3

### Expression of Recombinant 67076, 67102, 44181, 67084FL, or 67084alt Polypeptide in Bacterial Cells

[3155] In this example, human 8099, 46455, 54414, 53763, 67076, 67102, 44181, 67084FL, or 67084alt is expressed as a recombinant glutathione-S-transferase (GST) fusion polypeptide in E. coli and the fusion polypeptide is isolated and characterized. Specifically, 8099, 46455, 54414, 53763, 67076, 67102, 44181, 67084FL, or 67084alt is fused to GST and this fusion polypeptide is expressed in E. coli, e.g., strain PEB199. Expression of the GST-PLTR fusion polypeptide in PEB199 is induced with IPTG. The recombinant fusion polypeptide is purified from crude bacterial lysates of the induced PEB199 strain by affinity chromatography on glutathione beads. Using polyacrylamide gel electrophoretic analysis of the polypeptide purified from the bacterial lysates, the molecular weight of the resultant fusion polypeptide is determined.

### Example 4

### Expression of Recombinant 8099, 46455, 54414, 53763, 67076, 67102, 44181, 67084FL, or 67084alt Polypeptides in COS Cells

[3156] To express the human 8099, 46455, 54414, 53763, 67076, 67102, 44181, 67084FL, or 67084alt gene in COS cells, the pcDNA/Amp vector by Invitrogen Corporation (San Diego, Calif.) is used. This vector contains an SV40 origin of replication, an ampicillin resistance gene, an E. coli replication origin, a CMV promoter followed by a polylinker region, and an SV40 intron and polyadenylation site. A DNA fragment encoding the entire PLTR polypeptide and an HA tag (Wilson et al. (1984) Cell 37:767) or a FLAG tag fused in-frame to its 3′ end of the fragment is cloned into the polylinker region of the vector, thereby placing the expression of the recombinant polypeptide under the control of the CMV promoter.

[3157] To construct the plasmid, the human 8099, 46455, 54414, 53763, 67076, 67102, 44181, 67084FL, or 67084alt DNA sequence is amplified by PCR using two primers. The 5′ primer contains the restriction site of interest followed by approximately twenty nucleotides of the 8099, 46455, 54414, 53763, 67076, 67102, 44181, 67084FL, or 67084alt coding sequence starting from the initiation codon; the 3′ end sequence contains complementary sequences to the other restriction site of interest, a translation stop codon, the HA tag or FLAG tag and the last 20 nucleotides of the 8099, 46455, 54414, 53763, 67076, 67102, 44181, 67084FL, or 67084alt coding sequence. The PCR amplified fragment and the pCDNA/Amp vector are digested with the appropriate restriction enzymes and the vector is dephosphorylated using the CIAP enzyme (New England Biolabs, Beverly, Mass.). Preferably the two restriction sites chosen are different so that the 8099, 46455, 54414, 53763, 67076, 67102, 44181, 67084FL, or 67084alt gene is inserted in the correct orientation. The ligation mixture is transformed into E. coli cells (strains HB101, DH5α, SURE, available from Stratagene Cloning Systems, La Jolla, Calif., can be used), the transformed culture is plated on ampicillin media plates, and resistant colonies are selected. Plasmid DNA is isolated from transformants and examined by restriction analysis for the presence of the correct fragment.

[3158] COS cells are subsequently transfected with the human 8099, 46455, 54414, 53763, 67076, 67102, 44181, 67084FL, or 67084alt-pcDNA/Amp plasmid DNA using the calcium phosphate or calcium chloride co-precipitation methods, DEAE-dextran-mediated transfection, lipofection, or electroporation. Other suitable methods for transfecting host cells can be found in Sambrook, J., Fritsh, E. F., and Maniatis, T. Molecular Cloning: A Laboratory Manual. 2nd, ed., Cold Spring Harbor Laboratory, Cold Spring Harbor Laboratory Press, Cold Spring Harbor, N.Y., 1989. The expression of the IC54420 polypeptide is detected by radiolabelling (³⁵S-methionine or ³⁵S-cysteine available from NEN, Boston, Mass., can be used) and immunoprecipitation (Harlow, E. and Lane, D. Antibodies: A Laboratory Manual, Cold Spring Harbor Laboratory Press, Cold Spring Harbor, N.Y., 1988) using an HA specific monoclonal antibody. Briefly, the cells are labeled for 8 hours with ³⁵S-methionine (or ³⁵S-cysteine). The culture media are then collected and the cells are lysed using detergents (RIPA buffer, 150 mM NaCl, 1% NP-40, 0.1% SDS, 0.5% DOC, 50 mM Tris, pH 7.5). Both the cell lysate and the culture media are precipitated with an HA specific monoclonal antibody. Precipitated polypeptides are then analyzed by SDS-PAGE.

[3159] Alternatively, DNA containing the human 8099, 46455, 54414, 53763, 67076, 67102, 44181, 67084FL, or 67084alt coding sequence is cloned directly into the polylinker of the pCDNA/Amp vector using the appropriate restriction sites. The resulting plasmid is transfected into COS cells in the manner described above, and the expression of the 8099, 46455, 54414, 53763, 67076, 67102, 44181, 67084FL, or 67084alt polypeptide is detected by radiolabelling and immunoprecipitation using a 8099, 46455, 54414, 53763, 67076, 67102, 44181, 67084FL, or 67084alt-specific monoclonal antibody.

[3160] Equivalents

[3161] Those skilled in the art will recognize, or be able to ascertain using no more than routine experimentation, many equivalents to the specific embodiments of the invention described herein. Such equivalents are intended to be encompassed by the following claims.

The application's sequence listing, which the Patent Office published only in electronic form, follows.

SEQUENCE LISTING (85 sequences)

SEQ ID NO: 1 - DNA, 1528 bp, Homo sapiens
  CDS (103)..(1302)
ggaagactggcacgaggtcacaacatgagttagtggcgggaacaggacttctgcaggcccggggtttgggcctttgcttcagatctcactattcacagacacatgaaccccgggcaggcgagtgggaggcggacaggggagcggttcttccggcccccacccgtggcgatcccagcctccaggttcccggcagtcgccccgcctcgcccgtcacaaccctgccgcgtggggccggggttggagggggcggagcgcgcggtccgggcacacggagcaggttgggaccgcggcgggtaccggggccggggcgccatgcggaggccgagcgtgcgcgcggccgggctggtcctgtgcaccctgtgttacctgctggtgggcgctgctgtcttcgacgcgctcgagtccgaggcggaaagcggccgccagcgactgctggtccagaagcggggcgctctccggaggaagttcggcttctcggccgaggactaccgcgagctggagcgcctggcgctccaggctgagccccaccgcgccggccgccagtggaagttccccggctccttctacttcgccatcaccgtcatcactaccatcgagtacggccacgccgcgccgggtacggactccggcaaggtcttctgcatgttctacgcgctcctgggcatcccgctgacgctggtcactttccagagcctgggcgaacggctgaacgcggtggtgcggcgcctcctgttggcggccaagtgctgcctgggcctgcggtggacgtgcgtgtccacggagaacctggtggtggccgggctgctggcgtgtgccgccaccctggccctcggggccgtcgccttctcgcacttcgagggctggaccttcttccacgcctactactactgcttcatcaccctcaccaccatcggcttcggcgacttcgtggcactgcagagcggcgaggcgctgcagaggaagctcccctacgtggccttcagcttcctctacatcctcctggggctcacggtcattggcgccttcctcaacctggtggtcctgcgcttcctcgttgccagcgccgactggcccgagcgcgctgcccgcacccccagcccgcgccccccgggggcgcccgagagccgtggcctctggctgccccgccgcccggcccgctccgtgggctccgcctctgtcttctgccacgtgcacaagctggagaggtgcgcccgcgacaacctgggcttttcgcccccctcgagcccgggggtcgtgcgtggcgggcaggctcccaggcttggggcccggtggaagtccatctgacaaccccacccaggccagggtcgaatctggaatgggagggtctggcttcagctatcagggcaccctccccagggattggaaacggatgacgggcctctaggcggtcttctgccacgagcagtttctcattactgtctgtggctaagtcccctcccttctttycaaaaatatattacagtcacaccataagcacaaaaaaaaaaaaaaaaaaaaaaaaaaaaaa

SEQ ID NO: 2 - protein, 400 aa, Homo sapiens
MNPGQASGRRTGERFFRPPPVAIPASRFPAVAPPRPSQPCRVGPGLEGAERAVRAHGAGWDRGGYRGRGAMRRPSVRAAGLVLCTLCYLLVGAAVFDALESEAESGRQRLLVQKRGALRRKFGFSAEDYRELERLALQAEPHRAGRQWKFPGSFYFAITVITTIEYGHAAPGTDSGKVFCMFYALLGIPLTLVTFQSLGERLNAVVRRLLLAAKCCLGLRWTCVSTENLVVAGLLACAATLALGAVAFSHFEGWTFFHAYYYCFITLTTIGFGDFVALQSGEALQRKLPYVAFSFLYILLGLTVIGAFLNLVVLRFLVASADWPERAARTPSPRPPGAPESRGLWLPRRPARSVGSASVFCHVHKLERCARDNLGFSPPSSPGVVRGGQAPRLGARWKSI

SEQ ID NO: 3 - DNA, 1200 bp, Homo sapiens
  CDS (1)..(1200)
atgaaccccgggcaggcgagtgggaggcggacaggggagcggttcttccggcccccacccgtggcgatcccagcctccaggttcccggcagtcgccccgcctcgcccgtcacaaccctgccgcgtggggccggggttggagggggcggagcgcgcggtccgggcacacggagcaggttgggaccgcggcgggtaccggggccggggcgccatgcggaggccgagcgtgcgcgcggccgggctggtcctgtgcaccctgtgttacctgctggtgggcgctgctgtcttcgacgcgctcgagtccgaggcggaaagcggccgccagcgactgctggtccagaagcggggcgctctccggaggaagttcggcttctcggccgaggactaccgcgagctggagcgcctggcgctccaggctgagccccaccgcgccggccgccagtggaagttccccggctccttctacttcgccatcaccgtcatcactaccatcgagtacggccacgccgcgccgggtacggactccggcaaggtcttctgcatgttctacgcgctcctgggcatcccgctgacgctggtcactttccagagcctgggcgaacggctgaacgcggtggtgcggcgcctcctgttggcggccaagtgctgcctgggcctgcggtggacgtgcgtgtccacggagaacctggtggtggccgggctgctggcgtgtgccgccaccctggccctcggggccgtcgccttctcgcacttcgagggctggaccttcttccacgcctactactactgcttcatcaccctcaccaccatcggcttcggcgacttcgtggcactgcagagcggcgaggcgctgcagaggaagctcccctacgtggccttcagcttcctctacatcctcctggggctcacggtcattggcgccttcctcaacctggtggtcctgcgcttcctcgttgccagcgccgactggcccgagcgcgctgcccgcacccccagcccgcgccccccgggggcgcccgagagccgtggcctctggctgccccgccgcccggcccgctccgtgggctccgcctctgtcttctgccacgtgcacaagctggagaggtgcgcccgcgacaacctgggcttttcgcccccctcgagcccgggggtcgtgcgtggcgggcaggctcccaggcttggggcccggtggaagtccatc

SEQ ID NO: 4 - DNA, 1528 bp, Homo sapiens
  CDS (103)..(1302)
ggaagactggcacgaggtcacaacatgagttagtggcgggaacaggacttctgcaggcccggggtttgggcctttgcttcagatctcactattcacagacacatgaaccccgggcaggcgagtgggaggcggacaggggagcggttcttccggcccccacccgtggcgatcccagcctccaggttcccggcagtcgccccgcctcgcccgtcacaaccctgccgcgtggggccggggttggagggggcggagcgcgcggtccgggcacacggagcaggttgggaccgcggcgggtaccggggccggggcgccatgcggaggccgagcgtgcgcgcggccgggctggtcctgtgcaccctgtgttacctgctggtgggcgctgctgtcttcgacgcgctcgagtccgaggcggaaagcggccgccagcgactgctggtccagaagcggggcgctctccggaggaagttcggcttctcggccgaggactaccgcgagctggagcgcctggcgctccaggctgagccccaccgcgccggccgccagtggaagttccccggctccttctacttcgccatcaccgtcatcactaccatcgggtacggccacgccgcgccgggtacggactccggcaaggtcttctgcatgttctacgcgctcctgggcatcccgctgacgctggtcactttccagagcctgggcgaacggctgaacgcggtggtgcggcgcctcctgttggcggccaagtgctgcctgggcctgcggtggacgtgcgtgtccacggagaacctggtggtggccgggctgctggcgtgtgccgccaccctggccctcggggccgtcgccttctcgcacttcgagggctggaccttcttccacgcctactactactgcttcatcaccctcaccaccatcggcttcggcgacttcgtggcactgcagagcggcgaggcgctgcagaggaagctcccctacgtggccttcagcttcctctacatcctcctggggctcacggtcattggcgccttcctcaacctggtggtcctgcgcttcctcgttgccagcgccgactggcccgagcgcgctgcccgcacccccagcccgcgccccccgggggcgcccgagagccgtggcctctggctgccccgccgcccggcccgctccgtgggctccgcctctgtcttctgccacgtgcacaagctggagaggtgcgcccgcgacaacctgggcttttcgcccccctcgagcccgggggtcgtgcgtggcgggcaggctcccaggcttggggcccggtggaagtccatctgacaaccccacccaggccagggtcgaatctggaatgggagggtctggcttcagctatcagggcaccctccccagggattggaaacggatgacgggcctctaggcggtcttctgccacgagcagtttctcattactgtctgtggctaagtcccctcccttctttycaaaaatatattacagtcacaccataagcacaaaaaaaaaaaaaaaaaaaaaaaaaaaaaa

SEQ ID NO: 5 - protein, 400 aa, Homo sapiens
MNPGQASGRRTGERFFRPPPVAIPASRFPAVAPPRPSQPCRVGPGLEGAERAVRAHGAGWDRGGYRGRGAMRRPSVRAAGLVLCTLCYLLVGAAVFDALESEAESGRQRLLVQKRGALRRKFGFSAEDYRELERLALQAEPHRAGRQWKFPGSFYFAITVITTIGYGHAAPGTDSGKVFCMFYALLGIPLTLVTFQSLGERLNAVVRRLLLAAKCCLGLRWTCVSTENLVVAGLLACAATLALGAVAFSHFEGWTFFHAYYYCFITLTTIGFGDFVALQSGEALQRKLPYVAFSFLYILLGLTVIGAFLNLVVLRFLVASADWPERAARTPSPRPPGAPESRGLWLPRRPARSVGSASVFCHVHKLERCARDNLGFSPPSSPGVVRGGQAPRLGARWKSI

SEQ ID NO: 6 - DNA, 1200 bp, Homo sapiens
  CDS (1)..(1200)
atgaaccccgggcaggcgagtgggaggcggacaggggagcggttcttccggcccccacccgtggcgatcccagcctccaggttcccggcagtcgccccgcctcgcccgtcacaaccctgccgcgtggggccggggttggagggggcggagcgcgcggtccgggcacacggagcaggttgggaccgcggcgggtaccggggccggggcgccatgcggaggccgagcgtgcgcgcggccgggctggtcctgtgcaccctgtgttacctgctggtgggcgctgctgtcttcgacgcgctcgagtccgaggcggaaagcggccgccagcgactgctggtccagaagcggggcgctctccggaggaagttcggcttctcggccgaggactaccgcgagctggagcgcctggcgctccaggctgagccccaccgcgccggccgccagtggaagttccccggctccttctacttcgccatcaccgtcatcactaccatcgggtacggccacgccgcgccgggtacggactccggcaaggtcttctgcatgttctacgcgctcctgggcatcccgctgacgctggtcactttccagagcctgggcgaacggctgaacgcggtggtgcggcgcctcctgttggcggccaagtgctgcctgggcctgcggtggacgtgcgtgtccacggagaacctggtggtggccgggctgctggcgtgtgccgccaccctggccctcggggccgtcgccttctcgcacttcgagggctggaccttcttccacgcctactactactgcttcatcaccctcaccaccatcggcttcggcgacttcgtggcactgcagagcggcgaggcgctgcagaggaagctcccctacgtggccttcagcttcctctacatcctcctggggctcacggtcattggcgccttcctcaacctggtggtcctgcgcttcctcgttgccagcgccgactggcccgagcgcgctgcccgcacccccagcccgcgccccccgggggcgcccgagagccgtggcctctggctgccccgccgcccggcccgctccgtgggctccgcctctgtcttctgccacgtgcacaagctggagaggtgcgcccgcgacaacctgggcttttcgcccccctcgagcccgggggtcgtgcgtggcgggcaggctcccaggcttggggcccggtggaagtccatc

SEQ ID NO: 7 - DNA, 2590 bp, Homo sapiens
tgccctgcgcggagagcggcgagcgcagccatgccccaggccgcctccggggcagcagcagcggcggccggggccgatgcgcgggccgggggcgccggggggccggcggcggcccgggcgggacgatgaagcggcagaacgtgcgcacgctggcgctcatcgtgtgcaccttcacctacctgctggtgggcgccgcggtcttcgacgcgctggagtcggagcccgagctgatcgagcggcagcggctggagctgcggcagcaggagctgcgggcgcgctacaacctcagccagggcggctacgaggagctggagcgcgtcgtgctgcgcctcaagccgcacaaggccggcgtgcagtggcgcttcgccggctccttctacttcgccatcaccgtcatcaccaccatcggctacgggcacgcggcacccagcacggatggcggcaaggtgttctgcatgttctacgcgctgctgggcatcccgctcacgctcgtcatgttccagagcctgggcgagcgcatcaacaccttggtgaggtacctgctgcaccgcgccaagaaggggctgggcatgcggcgcgccgacgtgtccatggccaacatggtgctcatcggcttcttctcgtgcatcagcacgctgtgcatcggcgccgccgccttctcccactacgagcactggaccttcttccaggcctactactactgcttcatcaccctcaccaccatcggcttcggcgactacgtggcgctgcagaaggaccaggccctgcagacgcagccgcagtacgtggccttcagcttcgtctacatccttacgggcctcacggtcatcggcgccttcctcaacctcgtggtgctgcgcttcatgaccatgaacgccgaggacgagaagcgcgacgccgagcaccgcgcgctgctcacgcgcaacgggcaggcgggcggcggcggagggggtggcagcgcgcacactacggacaccgcctcatccacggcggcagcgggcggcggcggcttccgcaacgtctacgcggaggtgctgcacttccagtccatgtgctcgtgcctgtggtacaagagccgcgagaagctgcagtactccatccccatgatcatcccgcgggacctctccacgtccgacacgtgcgtggagcagagccactcgtcgccgggagggggcggccgctacagcgacacgccctcgcgacgctgcctgtgcagcggggcgccacgctccgccatcagctcggtgtccacgggtctgcacagcctgtccaccttccgcggcctcatgaagcgcaggagctccgtgtgactgccccgagggacctggagcacctgggggcgcgggcgggggacccctgctgggaggccaggagactgcccctgctgccttctgcccagtgggaccccgcacaacatccctcaccactctcccccagcacccccatctccgactgtgcctgcttgcaccagccggcaggaggccgggctctgaggacccctggggcccccatcggagccctgcaaattccgagaaatgtgaaacttggtggggtcagggaggaaaggcagaagctgggagcctcccttccctttgaaaatctaagaagctcccagtcctcagagaccctgctggtaccacaccccaccttcggaggggacttcatgttccgtgtacgtttgcatctctatttatacctctgtcctgctaggtctcccaccttcccttggttccaaaagccagggtgtctatgtccaagtcacccctactcagccccactccccttcctcatccccagctgtgtctcccaacctcccttcgtgttgttttgcatggctttgcagttatggagaaagtggaaacccagcagtccctaaagctggtccccagaaagcaggacagaaagaaggagggacaggcaggcagcaggaggggcgagctgggaggcaggaggcagcggcctgtcagtctgcagaatggtcgcactggaggttcaagctaactggcctccagccacattctcatagcaggtaggacttcagccttccagacactgcccttagaatctggaacagaagacttcagactcaccataattgctgataattacccactcttaaatttgtcgagtgatttttagcctctgaaaactctatgctggccactgattcctttgagtctcacaaaaccctacttaggtcatcagggcaggagttctcactcccattttacagatgagaatactgaggcctggacaggtgaagtgaccagagagcaaaaggcaaaggggtgggggctgggtgcagtggctcacacctgtattcccaacacttttggaggctgaggttggaggattgcttgagcccaggaattcgagaccagcctaggtgacatagtgagaccccatctctacaaaaaataaaaaattaaccaggtgtggtggcacgtgcctgggagtcccagcgacttgggaggctgaggtgggaggattgtttgagcctgggaggtcgaggctgtagtgagccctgattgcaccactgtactccagcctgggtgacagggcaagaccctgtctcaaaaaaaaaaaaaaa

SEQ ID NO: 8 - protein, 395 aa, Homo sapiens
PMKRQNVRTLALIVCTFTYLLVGAAVFDALESEPELIERQRLELRQQELRARYNLSQGGYEELERVVLRLKPHKAGVQWRFAGSFYFAITVITTIGYGHAAPSTDGGKVFCMFYALLGIPLTLVMFQSLGERINTLVRYLLHRAKKGLGMRRADVSMANMVLIGFFSCISTLCIGAAAFSHYEHWTFFQAYYYCFITLTTIGFGDYVALQKDQALQTQPQYVAFSFVYILTGLTVIGAFLNLVVLRFMTMNAEDEKRDAEHRALLTRNGQAGGGGGGGSAHTTDTASSTAAAGGGGFRNVYAEVLHFQSMCSCLWYKSREKLQYSIPMIIPRDLSTSDTCVEQSHSSPGGGGRYSDTPSRRCLCSGAPRSAISSVSTGLHSLSTFRGLMKRRSSV

SEQ ID NO: 9 - protein, 412 aa, Rattus norvegicus
PMKRQNVRTLALIVCTFTYLLVGAAVFDALESEPEMIERQRLELRQLELRARYNLSEGGYEELERVVLRLKPHKAGVQWRFAGSFYFAITVITTIGYGHAAPSTDGGKVFCMFYALLGIPLTLVMFQSLGERINTFVRYLLHRAKRGLGMRHAEVSMANMVLIGFVSCISTLCIGAAAFSYYERWTFFQAYYYCFITLTTIGFGDYVALQKDQALQTQPQYVAFSFVYILTGLTVIGAFLNLVVLRFMTMNAEDEKRDAEHRALLTHNGQAGGLGGLSCLSGSLGDGVRPRDPVTCAAAAGGMGVGVGVGGSGFRNVYAEMLHFQSMCSCLWYKSREKLQYSIPMIIPRDLSTSDTCVEHSHSSPGGGGRYSDTPSHPCLCSGTQRSAISSVSTGLHSLATFRGLMKRRSSV

SEQ ID NO: 10 - protein, 67 aa, Artificial Sequence
  Domain
PFSYYENGGWNFFDAFYFSFISLTTIGFGDYVPQNHDYSPQTYPYLPIVFIYILIGLAITTVVLDLV

SEQ ID NO: 11 - protein, 60 aa, Artificial Sequence
  Domain
PWNFFDAFYFSFISLTTIGFGDYVPQNHDYSPQTYPYLPIVFIYILIGLAITTVVLDLVG

SEQ ID NO: 12 - protein, 22 aa, Artificial Sequence
  Domain
PLFILFIVYICIGAAVFSYYEN

SEQ ID NO: 13 - protein, 60 aa, Artificial Sequence
  Domain
PNVRTLALIVCTFTYLLVGAAVFDALETEPEIIEVRGLGEPRQRLERRQEELRTRYNMSN

SEQ ID NO: 14 - DNA, 1943 bp, Homo sapiens
  CDS (466)..(1755)
gggggctctctccacgccttgctgccgcgtcccggtcctaggcgcccgggatccacggcccaccccgcccgcagcccgcggcctgtctggagaggagtatgaggcccggggccccgcggacgccggccaccgggcggcaggggcctagctgcggagccccgcgcccgagagcggcgggtaaggagccgcgggagccggcgaggcgtcggggcgcgcagaggagcgcccctgcccgggcacccgctgggccacgggactcgcgtgtggcctgagcgccggggaggaggcggaggcgcccctctgtccgggctctgggaaggcaacgaggggctctgcgaaggcggcgaggggctccgcggcggccccggacccctggccaccatcctcacgctcctgctcccgccggggggatgtcgtggcccgggccccgagcgccgccccggccccggggctgagctccggaccatgtcctcccgcagcccccggcccccgccccgccgtagccgccgccgcctgccgcgcccctcctgctgctgctgctgctgccgccgttcgcacctcaacgaggacaccggccgcttcgtgctgctggcggcgctcatcggcctctacctggtggcgggtgccacagtcttctcggcgctcgagagccccggcgaggcggaggcgcgggcgcgctggggcgccacgctgcgcaacttcagcgctgcgcacggcgtggccgagccagagctgcgcgccttcctccggcactacgaggccgcgctggccgccggcgtccgcgccgacgcgctgcgcccgcgctgggacttccccggcgccttctacttcgtgggcaccgtggtgtcaaccataggtttcggcatgaccacccccgcgacggtgggcgggaaggccttcctcatcgcctacgggctgttcggctgcgctgggaccatcctgttcttcaacctcttcctggagcgcatcatctcgctgctggccttcatcatgcgcgcctgccgggagcgccagctgcgccgcagcggcctgctgcccgccaccttccgccgcggctccgcgctctcggaggccgacagcctggcgggctggaagccctcggtgtaccacgtgctgctcatcctgggcctgttcgccgtgctgctgtcctgctgcgcctcggccatgtacaccagcgtggagggctgggactacgtggactcgctctacttctgcttcgtcaccttcagcaccatcggcttcggggacctggtgagcagccagcacgccgcctaccggaaccaggggctctaccgcctgggcaacttcctcttcatcctgctcggcgtgtgctgcatttactcgctcttcaacgtcatctccatcctcatcaagcaggtgctcaactggatgctgcgcaagctgagctgccgctgctgcgcgcgctgctgcccggctcctggcgcgcccctggcccggcgcaatgccatcaccccaggctcccggctgcgccgccgcctggccgcgctcggcgccgaccccgcggcccgcgacagcgacgccgagggccgccgcctctcgggcgagctcatctccatgcgcgacctcacggcctccaacaaggtgtcgctggcgctgctgcagaagcagctgtcggagacggccaacggctacccgcgcagcgtgtgcgtcaacacgcgccagaacggcttctcgggcggcgtgggcgcgctgggcatcatgaacaaccggctggccgagaccagcgcctccaggtagaccgcccgtccgcccgcgccggggaccctctccaggccgcggggccgccgggcgtggtttgcttctctcagtcactgctggcgctttcttaatctttatccaataaaatgaaacaaaaaaaatttttttaaagaaaaaaaaaaaaaaaagggcggatgttatcaagggcaggttttggggacgcc

SEQ ID NO: 15 - protein, 430 aa, Homo sapiens
MSSRSPRPPPRRSRRRLPRPSCCCCCCRRSHLNEDTGRFVLLAALIGLYLVAGATVFSALESPGEAEARARWGATLRNFSAAHGVAEPELRAFLRHYEAALAAGVRADALRPRWDFPGAFYFVGTVVSTIGFGMTTPATVGGKAFLIAYGLFGCAGTILFFNLFLERIISLLAFIMRACRERQLRRSGLLPATFRRGSALSEADSLAGWKPSVYHVLLILGLFAVLLSCCASAMYTSVEGWDYVDSLYFCFVTFSTIGFGDLVSSQHAAYRNQGLYRLGNFLFILLGVCCIYSLFNVISILIKQVLNWMLRKLSCRCCARCCPAPGAPLARRNAITPGSRLRRRLAALGADPAARDSDAEGRRLSGELISMRDLTASNKVSLALLQKQLSETANGYPRSVCVNTRQNGFSGGVGALGIMNNRLAETSASR

SEQ ID NO: 16 - DNA, 1290 bp, Homo sapiens
  CDS (1)..(1290)
atgtcctcccgcagcccccggcccccgccccgccgtagccgccgccgcctgccgcgcccctcctgctgctgctgctgctgccgccgttcgcacctcaacgaggacaccggccgcttcgtgctgctggcggcgctcatcggcctctacctggtggcgggtgccacagtcttctcggcgctcgagagccccggcgaggcggaggcgcgggcgcgctggggcgccacgctgcgcaacttcagcgctgcgcacggcgtggccgagccagagctgcgcgccttcctccggcactacgaggccgcgctggccgccggcgtccgcgccgacgcgctgcgcccgcgctgggacttccccggcgccttctacttcgtgggcaccgtggtgtcaaccataggtttcggcatgaccacccccgcgacggtgggcgggaaggccttcctcatcgcctacgggctgttcggctgcgctgggaccatcctgttcttcaacctcttcctggagcgcatcatctcgctgctggccttcatcatgcgcgcctgccgggagcgccagctgcgccgcagcggcctgctgcccgccaccttccgccgcggctccgcgctctcggaggccgacagcctggcgggctggaagccctcggtgtaccacgtgctgctcatcctgggcctgttcgccgtgctgctgtcctgctgcgcctcggccatgtacaccagcgtggagggctgggactacgtggactcgctctacttctgcttcgtcaccttcagcaccatcggcttcggggacctggtgagcagccagcacgccgcctaccggaaccaggggctctaccgcctgggcaacttcctcttcatcctgctcggcgtgtgctgcatttactcgctcttcaacgtcatctccatcctcatcaagcaggtgctcaactggatgctgcgcaagctgagctgccgctgctgcgcgcgctgctgcccggctcctggcgcgcccctggcccggcgcaatgccatcaccccaggctcccggctgcgccgccgcctggccgcgctcggcgccgaccccgcggcccgcgacagcgacgccgagggccgccgcctctcgggcgagctcatctccatgcgcgacctcacggcctccaacaaggtgtcgctggcgctgctgcagaagcagctgtcggagacggccaacggctacccgcgcagcgtgtgcgtcaacacgcgccagaacggcttctcgggcggcgtgggcgcgctgggcatcatgaacaaccggctggccgagaccagcgcctccagg

SEQ ID NO: 17 - protein, 394 aa, Homo sapiens
MKRQNVRTLALIVCTFTYLLVGAAVFDALESEPELIERQRLELRQQELRARYNLSQGGYEELERVVLRLKPHKAGVQWRFAGSFYFAITVITTIGYGHAAPSTDGGKVFCMFYALLGIPLTLVMFQSLGERINTLVRYLLHRAKKGLGMRRADVSMANMVLIGFFSCISTLCIGAAAFSHYEHWTFFQAYYYCFITLTTIGFGDYVALQKDQALQTQPQYVAFSFVYILTGLTVIGAFLNLVVLRFMTMNAEDEKRDAEHRALLTRNGQAGGGGGGGSAHTTDTASSTAAAGGGGFRNVYAEVLHFQSMCSCLWYKSREKLQYSIPMIIPRDLSTSDTCVEQSHSSPGGGGRYSDTPSRRCLCSGAPRSAISSVSTGLHSLSTFRGLMKRRSSV

SEQ ID NO: 18 - protein, 394 aa, Homo sapiens; identical to SEQ ID NO: 17

SEQ ID NO: 19 - protein, 316 aa, Caenorhabditis elegans
MLPLPWWMLGVGPEEEADESSDYDMVDGHSIEVQESVPTTPVSVFHTPSQSSIIDISDQLVDLPTFLKVAKRRSSTVLETATPAKTPKIQLSERRRKFQRNDTEVMIKTGEPVVDCDETLGLNWLFDTDYPRDAGSGDLLNSTFRIDHRNHGEGTSQITESPKNRDFPLFFSSFDDTTVLFNTTIAGDIDVNERNQASGDWIFRKDKSPTNDPIENDQETDEKTKSELGDGGEIVFKEPVQSTKKTRGRKRGTSVRIEKLSTSRRTSAKKKEEKQKETETFDADKNENPSTPTAPPTMTRRHTPSRKAKTNRTFRL

SEQ ID NO: 20 - protein, 336 aa, Mus musculus
MLQSLAGSSCVRLVERHRSAWCFGFLVLGYLLYLVFGAVVFSSEELPYEDLLRQELRKLKRRFLEEHECLSEPQLEQFLGRVLEASNYGVSVLSNASGNWNWDFTSALFFASTVLSTTGYGHTVPLSDGGKAFCIIYSVIGIPFTLLFLTALVQRVTVHVTRRPVLYFHIRWGFSKQVVAIVHAVLLGFVTVSCFFFIPAAVFSVLEDDWNFLESFYFCFISLSTIGLGDYVPGEGYNQKFRELYKIGITCYLLLGLITMLVVLETFCELHELKKFRKMFYVKKDKDEDLVHIMEHDQLSFSSVTEQVAGLKEEQKQSEPFVASQSPPYEDGSADH

SEQ ID NO: 21 - DNA, 5269 bp, Homo sapiens
  CDS (288)..(2735)
ccgtccggcagctgccctggtggcagtggctgaagtggcggcggcttcggcggctgcggcggctgcaacagcttcgggctcggggttttggcggcggcgccggcgggctaggctgcgcggtgcggaccccggcgcgcggtccgggttgctggggcggcgcgtaagatgcctctaatggaggagtttctgagcagcacccctggcccagtggctttgaaagggagctcaaaccagagactatttcaagccctggatatcatatcctgagggccacaggagaagagaacatggctgtgagtttggatgacgacgtgccgctcatcctgaccttggatgagggtggcagtgccccactggctccctccaacggcctgggccaagaagagctacctagcaaaaatggcggcagctatgccatccacgactcccaggcccccagtctcagctctgggggtgagagttccccctccagccccgcacacaactgggagatgaattaccaagaggcagcaatctacctccaggaaggcgagaacaacgacaagttcttcacccaccccaaggatgccaaggcgctggcggcctacctctttgcacacaatcacctcttctacctgatggagctggccacggccctgctgctgctgctgctctccctgtgcgaggcccccgccgtccccgcactccggcttggcatctatgtccacgccaccctggagctgtttgccctgatggtggtagtgtttgaactctgcatgaagttacgctggctgggcctccacaccttcatccggcacaagcggaccatggtcaagacctcggtgctggtggtgcagtttgtcgaggccatcgtggtgttggtacggcagatgtcccatgtgcgggtgacccgagcactgcgctgcattttcctggtggactgtcggtattgcggtggcgtccggcgcaacctgcggcagatcttccagtccctgccgcccttcatggacatcctcctgctgctgctgttcttcatgatcatctttgccatcctcggtttctacttgttctcccctaacccttccgacccctacttcagcaccctggagaacagcatcgtcagtctgtttgtccttctgaccacagccaatttcccagatgtgatgatgccctcctactcccggaacccctggtcctgcgtcttcttcatcgtgtacctctccatcgagctgtatttcatcatgaacctgcttctggctgtggtgttcgacaccttcaatgacattgagaaacgcaagttcaagtctttgctactgcacaagcgaaccgctatccagcatgcctaccgcctgctcatcagccagaggaggcctgccggcatctcctacaggcagtttgaaggcctcatgcgcttctacaagccccggatgagtgccagggagcgctatcttaccttcaaggccctgaatcagaacaacacacccctgctcagcctaaaggacttttacgatatctacgaagttgctgctttgaagtggaaggccaagaaaaacagagagcactggtttgatgagcttcccaggacggcgctcctcatcttcaaaggtattaatatccttgtgaagtccaaggccttccagtatttcatgtacttggtggtggcagtcaacggggtctggatcctcgtggagacatttatgctgaaaggtgggaacttcttctccaagcacgtgccctggagttacctcgtctttctaactatctatggggtggagctgttcctgaaggttgccggcctgggccctgtggagtacttgtcttccggatggaacttgtttgacttctccgtgacagtgttcgccttcctgggactgctggcgctggccctcaacatggagcccttctatttcatcgtggtcctgcgccccctccagctgctgaggttgtttaagttgaaggagcgctaccgcaacgtgctggacaccatgttcgagctgctgccccggatggccagcctgggcctcaccctgctcatcttttactactccttcgccatcgtgggcatggagttcttctgcgggatcgtcttccccaactgctgcaacacgagtacagtggcagatgcctaccgctggcgcaaccacaccgtgggcaacaggaccgtggtggaggaaggctactattatctcaataattttgacaacatcctcaacagctttgtgaccctgtttgagctcacagttgtcaacaactggtacatcatcatggaaggcgtcacctctcagacctcccactggagccgcctctacttcatgaccttttacattgtgaccatggtggtgatgacgatcattgtcgcctttatcctcgaggccttcgtcttccgaatgaactacagccgcaagaaccaggactcggaagttgatggtggcatcacccttgagaaggaaatctccaaagaagagctggttgccgtcctggagctctaccgggaggcacggggggcctcctcggatgtcaccaggctgctggagaccctctcccagatggagagataccagcaacattccatggtgtttctgggacggcgatcaaggaccaagagcgacctgagcctgaagatgtaccaggaggagatccaggagtggtatgaggagcatgccagggagcaagagcagcagcgacaactcagcagcagtgcagcccccgccgcccagcagcccccaggcagccgccagcgctcccagaccgttacctagcccagcgcccgaaagccgtctcttctatgcaataacacaatagtattactctactgcgatgtacggaactgcggtgtgtgtacacatactcacgtatatgcacatatttatatacaggaagaaaaaagacagacaagatggggcttggtttataaccaccttgccctgtcttccttaactccagaagccagtttggtgaggggtgggggtgcggccaccaggtctgagctcttcctactgtggaaggctccagaaggcccttcacaaggagacccctcacctggatccagtcgactgcggggcttgcccctcatgtgggctggcctccatcggccacgtccaaagctgtcactgctactgcttcaggctcacatccccccgacctgatggcgtgcccgccccctctccctgcggcccatgccacaggtttctgtgttttgctttagggacagaaccacttaggaaggaaagaactcccggtctccagggtggtatttcagtgtctgtgataatgtcacgcaacacctcttcggggaccagtgcccaggatctaatggaagcggaattggggcaactgggcccatgtggccagagctcagttagccagtgccgggcggccacagattacactgaccaatctcctcccttggctctgcaagcctcccacccagccttctctggcttaacccttgttggcgaaaactcttccacagtggcctccttggggacccagaacccggaggaaggggcatgaggcaggaagtggggccgatgtctgcaacccagaccacttcgtggaatgggctcttgaccaaatccctttttttgcgatttacccgttcaagcaaaacaacgttttggttaactaaggattgtgctaaagccgataccaggtccttcacacgtgtgcactaggaacaggagcgaacagcacagagagacgctccctgtgggacgcagcagccccgtggccccggcccagttcccagccaccctccctggctctgctcacaccagagatttccatagcaggagcggttggtgcagaagtaggttcagatgaacctcagttaacgtcgccacccctcctcccaccatggtaccctgtaggagccctgtatgacatctgagcgtggtggaggtaggagggttgccagctgcagtgaccctgccacagaggcagggtcagtgcagaggtcgctttggttccgcttccctgggccacagaacggaacacagcataggttctgcagcaggagccgcagtggcaggatggagggtgcgaagggcaaggagtgcactgctgggcattcctggccagccccggccctctggtgcctgcttcctgtgacttcagaaggcaggtggacagagcctccctctggccttgtcctcttcccagccacagaacgggcagggtggcacccgaccccaggggagcagtacctggtcccccaccccctcctcccaaccacctccaaggccaagctgggtcccatagccagcacggcatggttctccccttccccccttcccaggtcaggggagttggacaagtagcaggtgtttgtttttaaagcacagccctttgggaaagcaacacattattgagactcactgtgattcccccgggagtcagactggctttgtcctcttcctctctggagggccatgggccatcagcaggagctccacatcgagccccaggccagaaccccctccctttcacagagagggaactttattgcacaattgggtgccttttagcttttgtgtgttgaaatgggcgttttggaagcaagggtcaggggacagcttctaaaggtgtgagtctctgacctgagcatctgggcctcgcctgggcccttcttcctccccaggggtggaaacgtggaggggccagcagcaccccggggtctgcccaggggagtcaaggccccgaggtgggggggcctattccaggaggagtgggatctcggccctgtccagagcgagttaatgtgtccatctgcccaaccctgtcctaaaaaaggacctggttttggccaggacctgacaaatacccaatggcagcagtgtcaacagacgggagtccagccagggtgggtgcccttgtcattgaggttagggacagctatccccaggttatgcctggccccacccagcagggagttggggtccccccacaggctgtgagctctgtgggccctgggatgtgatctagctcagatgccctctcatccttgatgtcatagttgagtgcacccaagtggcacccactggcggccaggggcacagcctggtggtggtggcaatagaactgtgcccctcctcagctcctcgcttcccctcccacagccccagccttactccaccatgcggacaatcattttgtacggatcacgggagcaatgctgtacggttttgtacactggtggtttgtttcctagaaaacccattgtgtctctggatttctagcacattactaaaagagcctctgctttgtaaaaaaaaaaaaaaaaaaaaaaaaa

SEQ ID NO: 22 - protein, 816 aa, Homo sapiens
MAVSLDDDVPLILTLDEGGSAPLAPSNGLGQEELPSKNGGSYAIHDSQAPSLSSGGESSPSSPAHNWEMNYQEAAIYLQEGENNDKFFTHPKDAKALAAYLFAHNHLFYLMELATALLLLLLSLCEAPAVPALRLGIYVHATLELFALMVVVFELCMKLRWLGLHTFIRHKRTMVKTSVLVVQFVEAIVVLVRQMSHVRVTRALRCIFLVDCRYCGGVRRNLRQIFQSLPPFMDILLLLLFFMIIFAILGFYLFSPNPSDPYFSTLENSIVSLFVLLTTANFPDVMMPSYSRNPWSCVFFIVYLSIELYFIMNLLLAVVFDTFNDIEKRKFKSLLLHKRTAIQHAYRLLISQRRPAGISYRQFEGLMRFYKPRMSARERYLTFKALNQNNTPLLSLKDFYDIYEVAALKWKAKKNREHWFDELPRTALLIFKGINILVKSKAFQYFMYLVVAVNGVWILVETFMLKGGNFFSKHVPWSYLVFLTIYGVELFLKVAGLGPVEYLSSGWNLFDFSVTVFAFLGLLALALNMEPFYFIVVLRPLQLLRLFKLKERYRNVLDTMFELLPRMASLGLTLLIFYYSFAIVGMEFFCGIVFPNCCNTSTVADAYRWRNHTVGNRTVVEEGYYYLNNFDNILNSFVTLFELTVVNNWYIIMEGVTSQTSHWSRLYFMTFYIVTMVVMTIIVAFILEAFVFRMNYSRKNQDSEVDGGITLEKEISKEELVAVLELYREARGASSDVTRLLETLSQMERYQQHSMVFLGRRSRTKSDLSLKMYQEEIQEWYEEHAREQEQQRQLSSSAAPAAQQPPGSRQRSQTVT

SEQ ID NO: 23 - DNA, 2448 bp, Homo sapiens
  CDS (1)..(2448)
atggctgtgagtttggatgacgacgtgccgctcatcctgaccttggatgagggtggcagtgccccactggctccctccaacggcctgggccaagaagagctacctagcaaaaatggcggcagctatgccatccacgactcccaggcccccagtctcagctctgggggtgagagttccccctccagccccgcacacaactgggagatgaattaccaagaggcagcaatctacctccaggaaggcgagaacaacgacaagttcttcacccaccccaaggatgccaaggcgctggcggcctacctctttgcacacaatcacctcttctacctgatggagctggccacggccctgctgctgctgctgctctccctgtgcgaggcccccgccgtccccgcactccggcttggcatctatgtccacgccaccctggagctgtttgccctgatggtggtagtgtttgaactctgcatgaagttacgctggctgggcctccacaccttcatccggcacaagcggaccatggtcaagacctcggtgctggtggtgcagtttgtcgaggccatcgtggtgttggtacggcagatgtcccatgtgcgggtgacccgagcactgcgctgcattttcctggtggactgtcggtattgcggtggcgtccggcgcaacctgcggcagatcttccagtccctgccgcccttcatggacatcctcctgctgctgctgttcttcatgatcatctttgccatcctcggtttctacttgttctcccctaacccttccgacccctacttcagcaccctggagaacagcatcgtcagtctgtttgtccttctgaccacagccaatttcccagatgtgatgatgccctcctactcccggaacccctggtcctgcgtcttcttcatcgtgtacctctccatcgagctgtatttcatcatgaacctgcttctggctgtggtgttcgacaccttcaatgacattgagaaacgcaagttcaagtctttgctactgcacaagcgaaccgctatccagcatgcctaccgcctgctcatcagccagaggaggcctgccggcatctcctacaggcagtttgaaggcctcatgcgcttctacaagccccggatgagtgccagggagcgctatcttaccttcaaggccctgaatcagaacaacacacccctgctcagcctaaaggacttttacgatatctacgaagttgctgctttgaagtggaaggccaagaaaaacagagagcactggtttgatgagcttcccaggacggcgctcctcatcttcaaaggtattaatatccttgtgaagtccaaggccttccagtatttcatgtacttggtggtggcagtcaacggggtctggatcctcgtggagacatttatgctgaaaggtgggaacttcttctccaagcacgtgccctggagttacctcgtctttctaactatctatggggtggagctgttcctgaaggttgccggcctgggccctgtggagtacttgtcttccggatggaacttgtttgacttctccgtgacagtgttcgccttcctgggactgctggcgctggccctcaacatggagcccttctatttcatcgtggtcctgcgccccctccagctgctgaggttgtttaagttgaaggagcgctaccgcaacgtgctggacaccatgttcgagctgctgccccggatggccagcctgggcctcaccctgctcatcttttactactccttcgccatcgtgggcatggagttcttctgcgggatcgtcttccccaactgctgcaacacgagtacagtggcagatgcctaccgctggcgcaaccacaccgtgggcaacaggaccgtggtggaggaaggctactattatctcaataattttgacaacatcctcaacagctttgtgaccctgtttgagctcacagttgtcaacaactggtacatcatcatggaaggcgtcacctctcagacctcccactggagccgcctctacttcatgaccttttacattgtgaccatggtggtgatgacgatcattgtcgcctttatcctcgaggccttcgtcttccgaatgaactacagccgcaagaaccaggactcggaagttgatggtggcatcacccttgagaaggaaatctccaaagaagagctggttgccgtcctggagctctaccgggaggcacggggggcctcctcggatgtcaccaggctgctggagaccctctcccagatggagagataccagcaacattccatggtgtttctgggacggcgatcaaggaccaagagcgacctgagcctgaagatgtaccaggaggagatccaggagtggtatgaggagcatgccagggagcaagagcagcagcgacaactcagcagcagtgcagcccccgccgcccagcagcccccaggcagccgccagcgctcccagaccgttacc

SEQ ID NO: 24 - protein, 819 aa, Homo sapiens
MSVILDDDVLLILTLDEELSAPLTPSNGLGQEDLPSKNGGGQSGPNSQVPSLVSGADSPPSSPPGHNWEMNYQEAAIYLQEGQNNDKFFTHPKDARALAAYLFVHNHFFYMMELLTALLLLLLSLCESPAVPALKLRTYVHATLELFALMVVVFELCMKLRWLGFHTFVRHKRTMVKTSVLVVQFIEAIVVLVRQTSHVRVTRALRCIFLVDCRYCGGVRRNLRQIFQSLPPFMDILLLLLFFMIIFAILGFYLFSTNPSDPYFNTLENSIVNLFVLLTTANFPDVMMPSYSRNPWSCVFFIVYLSIELYFIMNLLLAVVFDTFNDIEKHKFKSLLLHKRTAIQHAYHLLVSQRRPAGISYRQFEGLMRFYKPRMSARERFLTFKALNQSNTPLLSLKDFYDIYEVAALQWKAKKNRQHWFDELPRTAFLIFKGINILVNSKAFQYFMYLVVAVNGVWILVETFMLKGGNFISKHVPWSYLVFLTIYGVELFMKVAGLGPVEYLSSGWNLFDFSLTAFAFLGLLALTLNMEPFYFIVVLRPLQLLRLFKLKKRYRNVLDTMFELLPRMASLGLTLLTFYYSFAIVGMEFFSGRLSPNCSTPARWGLTPIDSSITRLGNKTKFGRKGYYYLNNFDNILNSFVTLFELTVVNNWYIIMEGVTSQTSHWSRLYFMTFYIVTMVVMTIIVAFILEAFVFRMNYSRKSQESEVDSGIVIEKEMSKEELLAILELHREARGTSSDITRLLDTLSQMEKYQQNSMVFLGRQSRTKSDLSLKMYQEEIQEWYEEHAREQEQQQLRGSAPSPAAQQTPGSRQRSQTVT

SEQ ID NO: 25 - protein, 724 aa, Rattus sp.
MEDPLIGRDSLGGGGTDRVRRSEAITHGTPFQKAAALVDLAEDGIGLPVEILDQSSFGESARYYFIFTRLDLIWSLNYFALLFLNFFEQPLWCEKNPKPSCKDRDYYYLGELPYLTNAESIIYEASSRIFWTSRLNLVKVACVVILFVDVLVDFLYLSPLAFDFLPFRIAPYVRVIIFILSIRQRCADHVMELRDTLVLLSGMLGTYLNILALWMLFLLFASWIAFVMFEDTQQGLTVFTSYGATLYQMFILFTTSNNPDVWIPAYKSSRWSSVFFVLYVLIGVYFVTNLILAVVYDSFKEQLAKQVSGMDQMKRRMLEKAFGLIDSDKNGEIDKNQCIKLFEQLTNYRTLPKISKEEFGLIFDELDDTRDFKINKDEFADLCQAIALRFQKEEVPSLFEHFPQIYHSALSQQLRAFVRSPNFGYAISFILIINFIAVVVETTLDIEESSAQKPWQVAEFVFGWIYVLEMALKIYTYGFENYWREGANRFDFLVTWVIVIGETATFITPDENTFFSNGEWIRYLLLARMLRLIRLLMNVQRYRAFIATFITLIPSLMPYLGTIFCVLCIYCSIGVQVFGGLVNAGNKKLFETELAEDDYLLFNFNDYPNGMVTLFNLLVMGNWQVWMESYKDLTGTWWSITYFVSFYVITILLLLNLVVAFVLEAFFTELDLEEEEKCQGQDSQEKRNRRRSAGSKSRSQRVDTLLHHMLGDELSKPECSTSDT

SEQ ID NO: 26 - DNA, 21 bp, Artificial Sequence
  primer
ccagagcgagttaatgtgtcc

SEQ ID NO: 27 - DNA, 21 bp, Artificial Sequence
  primer
agctgtccctaacctcaatga

SEQ ID NO: 28 - DNA, 1408 bp, Homo sapiens
  CDS (84)..(1340)
ccacgcgtccgcggacgcgtgggtcggcaccggcgaggccgtgctggaacccgggcctcagccgcagccgcagcggggccgacatgacgacagctccccaggagccccccgcccggcccctccaggcgggcagtggagctggcccggcgcctgggcgcgccatgcgcagcaccacgctcctggccctgctggcgctggtcttgctttacttggtgtctggtgccctggtgttccgggccctggagcagccccacgagcagcaggcccagagggagctgggggaggtccgagagaagttcctgagggcccatccgtgtgtgagcgaccaggagctgggcctcctcatcaaggaggtggctgatgccctgggagggggtgcggacccagaaaccaactcgaccagcaacagcagccactcagcctgggacctgggcagcgccttctttttctcagggaccatcatcaccaccatcggctatggcaatgtggccctgcgcacagatgccgggcgcctcttctgcatcttttatgcgctggtggggattccgctgtttgggatcctactggcaggggtcggggaccggctgggctcctccctgcgccatggcatcggtcacattgaagccatcttcttgaagtggcacgtgccaccggagctagtaagagtgctgtcggcgatgcttttcctgctgatcggctgcctgctctttgtcctcacgcccacgttcgtgttctgctatatggaggactggagcaagctggaggccatctactttgtcatagtgacgcttaccaccgtgggctttggcgactatgtggccggcgcggaccccaggcaggactccccggcctatcagccgctggtgtggttctggatcctgctcggcctggcttacttcgcctcagtgctcaccaccatcgggaactggctgcgagtagtgtcccgccgcactcgggcagagatgggcggcctcacggctcaggctgccagctggactggcacagtgacagcgcgcgtgacccagcgagccgggcccgccgccccgccgccggagaaggagcagccactgctgcctccaccgccctgtccagcgcagccgctgggcaggccccgatccccttcgccccccgagaaggctcagccgccttccccgcccacggcctcggccctggattatcccagcgagaacctggccttcatcgacgagtcctcggatacgcagagcgagcgcggctgcccgctgccccgcgcgccgagaggtcgccgccgcccaaatccccccaggaagcccgtgcggccccgcggccccgggcgtccccgagacaaaggcgtgccggtgtaggggcaggatccctggccgggcctctcaagggcttcgtttctgctctccccggcatgcctggcttc

SEQ ID NO: 29 - protein, 419 aa, Homo sapiens
MTTAPQEPPARPLQAGSGAGPAPGRAMRSTTLLALLALVLLYLVSGALVFRALEQPHEQQAQRELGEVREKFLRAHPCVSDQELGLLIKEVADALGGGADPETNSTSNSSHSAWDLGSAFFFSGTIITTIGYGNVALRTDAGRLFCIFYALVGIPLFGILLAGVGDRLGSSLRHGIGHIEAIFLKWHVPPELVRVLSAMLFLLIGCLLFVLTPTFVFCYMEDWSKLEAIYFVIVTLTTVGFGDYVAGADPRQDSPAYQPLVWFWILLGLAYFASVLTTIGNWLRVVSRRTRAEMGGLTAQAASWTGTVTARVTQRAGPAAPPPEKEQPLLPPPPCPAQPLGRPRSPSPPEKAQPPSPPTASALDYPSENLAFIDESSDTQSERGCPLPRAPRGRRRPNPPRKPVRPRGPGRPRDKGVPV

SEQ ID NO: 30 - DNA, 1257 bp, Homo sapiens
  CDS (1)..(1257)
atgacgacagctccccaggagccccccgcccggcccctccaggcgggcagtggagctggcccggcgcctgggcgcgccatgcgcagcaccacgctcctggccctgctggcgctggtcttgctttacttggtgtctggtgccctggtgttccgggccctggagcagccccacgagcagcaggcccagagggagctgggggaggtccgagagaagttcctgagggcccatccgtgtgtgagcgaccaggagctgggcctcctcatcaaggaggtggctgatgccctgggagggggtgcggacccagaaaccaactcgaccagcaacagcagccactcagcctgggacctgggcagcgccttctttttctcagggaccatcatcaccaccatcggctatggcaatgtggccctgcgcacagatgccgggcgcctcttctgcatcttttatgcgctggtggggattccgctgtttgggatcctactggcaggggtcggggaccggctgggctcctccctgcgccatggcatcggtcacattgaagccatcttcttgaagtggcacgtgccaccggagctagtaagagtgctgtcggcgatgcttttcctgctgatcggctgcctgctctttgtcctcacgcccacgttcgtgttctgctatatggaggactggagcaagctggaggccatctactttgtcatagtgacgcttaccaccgtgggctttggcgactatgtggccggcgcggaccccaggcaggactccccggcctatcagccgctggtgtggttctggatcctgctcggcctggcttacttcgcctcagtgctcaccaccatcgggaactggctgcgagtagtgtcccgccgcactcgggcagagatgggcggcctcacggctcaggctgccagctggactggcacagtgacagcgcgcgtgacccagcgagccgggcccgccgccccgccgccggagaaggagcagccactgctgcctccaccgccctgtccagcgcagccgctgggcaggccccgatccccttcgccccccgagaaggctcagccgccttccccgcccacggcctcggccctggattatcccagcgagaacctggccttcatcgacgagtcctcggatacgcagagcgagcgcggctgcccgctgccccgcgcgccgagaggtcgccgccgcccaaatccccccaggaagcccgtgcggccccgcggccccgggcgtccccgagacaaaggcgtgccggtg

SEQ ID NO: 31 - protein, 531 aa, Homo sapiens
MVRNKVAPVEDGANIQRNFEPPPPYTTPTDSPEDKIRSNSTATTASQPEFQGCWTIVVVAILFIINLLNYMDRYTIAGVLNDVQTYYNISDAWAGLIQTTFMVFFIIFSPICGFLGDRYNRKWIFVVGIAIWVSAVFASTFIPSNQFWLFLLFRGIVGIGEASYAIISPTVIADMFTGVLRSRMLMVFYFAIPFGCGLGFVVGSAVASWTGHWQWGVRVTGVLGIVCLLLIIVFVREPERGKAEREKGEIAASTEATSYLDDMKDLLSNATYVTSSLGYTATVFMVGTLAWWAPITIQYADSARRNGTITEDQKANINLVFGALTCVGGVLGVAIGTLVSNMWSRGVGPFKHIQTVRADALVCAIGAAICIPTLILAIQNIESNMNFAWGMLFICIVASSFNWATNVDLLLSVVVPQRRSSASSWQILISHMFGDASGPYILGLISDAIRGNEDTAQAHYKSLVTSFWLCVGTLVLSVILFGISAITVVKDKARFNEIMLAQANKDNTSSGTLPIEDRNTEDETGSEVQHM

SEQ ID NO: 32 - protein, 453 aa, Homo sapiens
MLKMVLTENPNQEIATSLEFLLLQNSPGSLRAQQRMSYYGSSYHIINADAKYPGYPPEHIIAEKRRARRRLLHKDGSCNVYFKHIFGEWGSYVVDIFTTLVDTKWRHMFVIFSLSYILSWLIFGSVFWLIAFHHGDLLNDPDITPCVDNVHSFTGAFLFSLETQTTIGYGYRCVTEECSVAVLMVILQSILSCIINTFIIGAALAKMATARKRAQTIRFSYFALIGMRDGKLCLMWRIGDFRPNHVVEGTVRAQLLRYTEDSEGRMTMAFKDLKLVNDQIILVTPVTIVHEIDHESPLYALDRKAVAKDNFEILVTFIYTGDSTGTSHQSRSSYVPREILWGHRFNDVLEVKRKYYKVNCLQFEGSVEVYAPFCSAKQLDWKDQQLHIEKAPPVRESCTSDTKARRRSFSAVAIVSSCENPEETTTSATHEYRETPYQKALLTLNRISVESQM

SEQ ID NO: 33 - DNA, 1362 bp, Homo sapiens
  CDS (1)...(1362)
atgctaaaaatggttctaactgaaaacccaaaccaagaaatagcaacaagtctagaattcttactactacaaaactcacctggatccctaagggcacagcaaagaatgagctattacggcagcagctatcatattatcaatgcggacgcaaaatacccaggctacccgccagagcacattatagctgagaagagaagagcaagaagacgattacttcacaaagatggcagctgtaatgtctacttcaagcacatttttggagaatggggaagctatgtggttgacatcttcaccactcttgtggacaccaagtggcgccatatgtttgtgatattttctttatcttatattctctcgtggttgatatttggctctgtcttttggctcatagcctttcatcatggcgatctattaaatgatccagacatcacaccttgtgttgacaacgtccattctttcacaggggcctttttgttctccctagagacccaaaccaccataggatatggttatcgctgtgttactgaagaatgttctgtggccgtgctcatggtgatcctccagtccatcttaagttgcatcataaatacctttatcattggagctgccttggccaaaatggcaactgctcgaaagagagcccaaaccattcgtttcagctactttgcacttataggtatgagagatgggaagctttgcctcatgtggcgcattggtgattttcggccaaaccacgtggtagaaggaacagttagagcccaacttctccgctatacagaagacagtgaagggaggatgacgatggcatttaaagacctcaaattagtcaacgaccaaatcatcctggtcaccccggtaactattgtccatgaaattgaccatgagagccctctgtatgcccttgaccgcaaagcagtagccaaagataactttgagattttggtgacatttatctatactggtgattccactggaacatctcaccaatctagaagctcctatgttccccgagaaattctctggggccataggtttaatgatgtcttggaagttaagaggaagtattacaaagtgaactgcttacagtttgaaggaagtgtggaagtatatgcccccttttgcagtgccaagcaattggactggaaagaccagcagctccacatagaaaaagcaccaccagttcgagaatcctgcacgtcggacaccaaggcgagacgaaggtcatttagtgcagttgccattgtcagcagctgtgaaaaccctgaggagaccaccacttccgccacacatgaatatagggaaacaccttatcagaaagctctcctgactttaaacagaatctctgtagaatcccaaatgtag

SEQ ID NO: 34 - DNA, 4003 bp, Homo sapiens
  CDS (604)...(1518)
gagtcgacccacgcgtccgaaagctgcgcccggcgcccgagaccggcagctgcgtggggcgggggctgcgcccgagcccgatctgccgctccggctccgagcagtggtctcggaaagagggtcgtggtcccgcacggatgcgcttgttgggagaaaccttggagattcacggcaaggcgtaaagcctggggcttccaacgatactctgggcagggatggaagcctagatgcctcaccgcaaggagcggccgagcgggtcctcgcttcacacacacggcagcaccggcaccgcggagggaggaaacatgtcccggctgtctctcacccggtcgcctgtgtctcccctggctgcccagggcatccccctgccagcccagctcaccaagtccaatgcacctgtgcacatcgatgtgggcggccacatgtacaccagcagcctggccacgctcaccaagtaccctgactccaggataagccgcctcttcaatggcactgaacccatcgtcctggacagtttgaagcaacattatttcattgaccgggatggggagattttccgctacgtcctgagcttcctgcggacgtccaagctgctgcttccggatgactttaaggacttcagtctgctgtacgaggaggcgcgctactatcagctccagcccatggtgcgcgagctggagcgctggcagcaggagcaggagcagcggcgccgcagccgggcctgtgactgcctggtggtgcgcgtcacgcccgacttgggcgagcggatcgcactcagcggcgagaaggccctcatcgaggaggtcttccccgagaccggagacgtcatgtgcaactccgtcaacgccggctggaaccaggaccccacgcacgtcatccgcttcccgctcaatggctactgccggctcaactcggtacaggtcctggagcggctgttccagaggggtttcagcgtggctgcgtcctgtgggggcggtgtggactcctcccagttcagcgagtatgtgctttgccgggaggagcggcggccgcagcccacccccactgctgttcgaatcaagcaggaacccctggactaggccctgcttcagtgcccacctgggcccccccagggacctggaaacagtgctggggagttctgcctgtgtatacttggccgtgggcatgagaccgagggtgaggctggagggtccaaagctggcccagcgagcaccagggtcccaggtgtcatggcaacagaacgtgggatgctggaggcatgcctgcagaaggactgttgatgcgacccaaagatacagcggtgggatctctgctgccagctctcccagcccctcagcttcgcagcctggcgcagcatcctctgaggccccggggcctgttggggcggggttggaagagccgtctgcagctacttcagaggagctgtttatccctctccacgcggggcagactctggcgggtctcctagcgtccgagagatggcttatttttctacagtatttaaaatggatgcagccctaactgcaaaagtcagagaggctgacaaggaccaatgcttctttatctggtgctcagttctcagtcagacgtgcagcatggctgcagggtggaccagctgcctggcattcaggcccagatgcctgcagggctggggctctcgggacagatgcagggatgtgtgctgcagggctgctgggaggagagtggtgggggcctgagggctgagtgattctgtaaccacctgagaccttcacgtttgctgccgttgggggctcaggctgcactccccgggtcacctgacctgctgcccaggggcttccagtcctgtctgtgtggactggcacctgggctgctggagaagtctcctcccgttcggaccagcctcagggctgcacgttacctcaggaatgggccccaccatgaaggggcccatctgtcagcagcgtcttctaggtccccagctcagggagccatccccagctccagttttctcatgcgaatatgcacagttttaattcacgttgttacactagcctgccgatgagacccagacacaggcagacctggcgctcttgacccctgattccagtgaggactggccctgaggagtccttgcagacctgctgcctgccccacgacaggcccaaagatggaccccccctggccttgtgacagctccccaagtgttctccggtggagaaactgcagaggactggtgggcggggctccccagccatcaccatcctgtgtacaatggctgtagacttgtatatggctcctttaatattgtaaagatgctgatgtacaattgtcgtgcatttgtgtgaacacattgcgttcccagtccatgccataaatgatgctctcaagcaaaagactggaggctctgtcctgtgcagaagcagcagccagactcccgcattcgatgttgtgcagggaggtttgggggcggaacggattcctcccttggatccttcagttcccatcgaggaataacccgcagcagtggtggaggaaggtcagtggctgggtcctgagcttggtgttatttattgcatttgggtgcctgtcccctcagggcagcacagattctgaattctgattcacagtccctagccagatgggaactgggaaagagacagaaggcgtctgggtgcttttgaaccctgtctcaaatgtttgggattttctctctcactattctttggttggggatgatgtcctctttagacccccacgtaatggtatgagaaggtggcaggcagtggctcagccagccagggggcaccaagtcatgcagccagcgtgagacctgcagttcacctaagcacagaacgagatctcagtatgcctccatgtaaacagattcacataggcctccaatttcaatgagaccttttgcattttttctcaaagcccttatgttctaacccatgagaaccattttacctgccctctaagggccaccagcttcgacctgcctcaggggacagcagcacagaccagtggctccctgtccaaggccgcagagcagacgccatcccactgtacaatcgaatttgctggacaaacttgataggtttctctgcttagcaacgagcctatagttagttggcacatctgcgttttggcatctgaggctcccatctgagtggaggagaaagtgttgtgtttattagcaggaagtcttgtgaaaacagctcgctgctgtgtatgtttatggatttttctgatataacagccagcatggttaccgagtggtagagattctcgaacattctcaaactctctttttgggtaaatgattgtgctaaaaataaaatttattaataaagaaggggaaaaaggagtaactctacctgactaaatgttactctaatttatttatttctttactaattaagtaaaaccaggaagtatgattttacatcaaccagagaatttctgaatttatagggaaacactatgtccccataatgatgctataattctaatatatctagtccccataaacagtaagtacaaattatcattcctttaaagcatttttacacttcctggaatgagtatattatcagcaatcttttgtcaaatgccagccgtataaatgttacttctgctctttgtaaacctcaaaactcattattcttgattataagcaactggacagaaccatgccaaagcttccccgtttcccaccaaacccctgccagtgagtgcagagaactcgcaaagccacagcaggcggtctcagccaccgtcccgctcacaggggcccaatgccaggtcacaacactaagaatatctttcaaaaaatgtgtctttttttttttttttaaagctactgcttgactgttccttagaataaataaaggatattttatwawtttaaaaaaaaaaaaaaaaaaaaaaaaaaaaaaaaaaaaaagggcgggccgctagactagtctagagaaaaaacctcccacacctcccctgaacctgaacacataacatgacacat

SEQ ID NO: 35 - protein, 305 aa, Homo sapiens
MTLRTSVCCTRRRATISSSPWCASWSAGSRSRSSGAAAGPVTAWWCASRPTWASGSHSAARRPSSRRSSPRPETSCATPSTPAGTRTPRTSSASRSMATAGSTRYRSWSGCSRGVSAWLRPVGAVWTPPSSASMCFAGRSGGRSPPPLLFESSRNPWTRPCFSAHLGPPRDLETVLGSSACVYLAVGMRPRVRLEGPKLAQRAPGSQVSWQQNVGCWRHACRRTVDATQRYSGGISAASSPSPSASQPGAASSEAPGPVGAGLEEPSAATSEELFIPLHAGQTLAGLLASERWLIFLQYLKWMQP

SEQ ID NO: 36 - DNA, 915 bp, Homo sapiens
  CDS (1)...(915)
atgactttaaggacttcagtctgctgtacgaggaggcgcgctactatcagctccagcccatggtgcgcgagctggagcgctggcagcaggagcaggagcagcggcgccgcagccgggcctgtgactgcctggtggtgcgcgtcacgcccgacttgggcgagcggatcgcactcagcggcgagaaggccctcatcgaggaggtcttccccgagaccggagacgtcatgtgcaactccgtcaacgccggctggaaccaggaccccacgcacgtcatccgcttcccgctcaatggctactgccggctcaactcggtacaggtcctggagcggctgttccagaggggtttcagcgtggctgcgtcctgtgggggcggtgtggactcctcccagttcagcgagtatgtgctttgccgggaggagcggcggccgcagcccacccccactgctgttcgaatcaagcaggaacccctggactaggccctgcttcagtgcccacctgggcccccccagggacctggaaacagtgctggggagttctgcctgtgtatacttggccgtgggcatgagaccgagggtgaggctggagggtccaaagctggcccagcgagcaccagggtcccaggtgtcatggcaacagaacgtgggatgctggaggcatgcctgcagaaggactgttgatgcgacccaaagatacagcggtgggatctctgctgccagctctcccagcccctcagcttcgcagcctggcgcagcatcctctgaggccccggggcctgttggggcggggttggaagagccgtctgcagctacttcagaggagctgtttatccctctccacgcggggcagactctggcgggtctcctagcgtccgagagatggcttatttttctacagtatttaaaatggatgcagccc

SEQ ID NO: 37 - DNA, 4197 bp, Homo sapiens
  CDS (1)...(3348)
atgaggagactgagtttgtggtggctgctgagcagggtctgtctgctgttgccgccgccctgcgcactggtgctggccggggtgcccagctcctcctcgcacccgcagccctgccagatcctcaagcgcatcgggcacgcggtgagggtgggcgcggtgcacttgcagccctggaccaccgccccccgcgcggccagccgcgctccggacgacagccgagcaggagcccagagggatgagccggagccagggactaggcggtccccggcgccctcgccgggcgcacgctggttggggagcaccctgcatggccgggggccgccgggctcccgtaagcccggggagggcgccagggcggaggccctgtggccacgggacgccctcctatttgccgtggacaacctgaaccgcgtggaagggctgctaccctacaacctgtctttggaagtagtgatggccatcgaggcaggcctgggcgatctgccacttttgcccttctcctcccctagttcgccatggagcagtgaccctttctccttcctgcaaagtgtgtgccataccgtggtggtgcaaggggtgtcggcgctgctcgccttcccccagagccagggcgaaatgatggagctcgacttggtcagcttagtcctgcacattccagtgatcagcatcgtgcgccacgagtttccgcgggagagtcagaatccccttcacctacaactgagtttagaaaattcattaagttctgatgctgatgtcactgtctcaatcctgaccatgaacaactggtacaattttagcttgttgctgtgccaggaagactggaacatcaccgacttcctcctccttacccagaataattccaagttccaccttggttctatcatcaacatcaccgctaacctcccctccacccaggacctcttgagcttcctacagatccagcttgagagtattaagaacagcacacccacagtggtgatgtttggctgcgacatggaaagtatccggcggattttcgaaattacaacccagtttggggtcatgccccctgaacttcgttgggtgctgggagattcccagaatatggaggaactgaggacagagggtctgcccttaggactcattgctcatggaaaaacaacacagtctgtctttgagcactacgtacaagatgctatggagctggtcgcaagagctgtagccacagccaccatgatccaaccagaacttgctctcattcccagcacgatgaactgcatggaggtggaaactacaaatctcacttcaggacaatatttatcaaggtttctagccaataccactttcagaggcctcagtggttccattagagtaaaaggttccaccatcgtcagctcagaaaacaactttttcatctggaatcttcaacatgaccccatgggaaagccaatgtggacccgcttgggcagctggcaggggagaaagattgtcatggactatggaatatggccagagcaggcccagagacacaaaacccacttccaacatccaagtaagctacacttgagagtggttaccctgattgagcatccttttgtcttcacaagggaggtagatgatgaaggcttgtgccctgctggccaactctgtctagaccccatgactaatgactcttccacactggacagcctttttagcagcctccatagcagtaatgatacagtgcccattaaattcaagaagtgctgctatggatattgcattgatctgctggaaaagatagcagaagacatgaactttgacttcgacctctatattgtaggggatggaaagtatggagcatggaaaaatgggcactggactgggctagtgggtgatctcctgagagggactgcccacatggcagtcacttcctttagcatcaatactgcacggagccaggtgatagacttcaccagccctttcttctccaccagcttgggcatcttagtgaggacccgagatacagcagctcccattggagccttcatgtggccactccactggacaatgtggctggggatttttgtggctctgcacatcactgccgtcttcctcactctgtatgaatggaagagtccatttggtttgactcccaaggggcgaaatagaagtaaagtcttctccttttcttcagccttgaacatctgttatgccctcttgtttggcagaacagtggccatcaaacctccaaaatgttggactggaaggtttctaatgaacctttgggccattttctgtatgttttgcctttccacatacacggcaaacttggctgctgtcatggtaggtgagaagatctatgaagagctttctggaatacatgaccccaagttacatcatccttcccaaggattccgctttggaactgtccgagaaagcagtgctgaagattatgtgagacaaagtttcccagagatgcatgaatatatgagaaggtacaatgttccagccacccctgatggagtggagtatctgaagaatgatccagagaaactagacgccttcatcatggacaaagcccttctggattatgaagtgtcaatagatgctgactgcaaacttctcactgtggggaagccatttgccatagaaggatacggcattggcctcccacccaactctccattgaccgccaacatatccgagctaatcagtcaatacaagtcacatgggtttatggatatgctccatgacaagtggtacagggtggttccctgtggcaagagaagttttgctgtcacggagactttgcaaatgggcatcaaacacttctctgggctctttgtgctgctgtgcattggatttggtctgtccattttgaccaccattggtgagcacatagtatacaggctgctgctaccacgaatcaaaaacaaatccaagctgcaatactggctccacaccagccagagattacacagagcaataaatacatcatttatagaggaaaagcagcagcatttcaagaccaaacgtgtggaaaagaggtctaatgtgggaccccgtcagcttaccgtatggaatacttccaatctgagtcatgacaaccgacggaaatacatctttagtgatgaggaaggacaaaaccagctgggcatccagatccaccaggacatccccctccctccaaggagaagagagctccctgccttgcggaccaccaatgggaaagcagactccctaaatgtatctcggaactcagtgatgcaggaactctcagagctcgagaagcagattcaggtgatccgtcaggagctgcagctggctgtgagcaggaaaacggagctggaggagtatcaaaggacaagtcggacttgtgagtcctaggtgaccacactgcttccctttctcagttcctgaccttcctctgagcccttgagacactttgtaatgctcttttgtaactatcgacaaaggtgtggggaagctgaggtctaggtcttcttaaaggtcaagtctgctctccctcgcctaaagtgcagcagcagctcctctcaagctcactctctaggtctccagggtaggagtgtttttctagcaagaatcttagtcaggagtaagctctgtgcgagagatctgtgaataaccagataaccccagctgccgttaaccttttcaccaggtgccacagtaatatttctggtttttagccctttctctgcactaccaacaagagataaaattgttactcacacttatgtcttactgggttgctggttttcatcgtaacacagaacgaggttatctagggttgtagcttttgatacaactccccgatctagatttattcctacattctgaatggggagcaggtaagagcagagcacctcccactgggggtggggtatttaaaaattaactcattagtatcataaacgtcaaggattgattggaccaggcaagagccatgtttttgagaaggttctggatctctgactccatcctgactgtttagtaagagcatgcttacaccctactgtgaaaaggggaggggatgtggtaagcagaaacagaagacaggcagcagaggcattaaaaatgcataccatgctttcagaacaaaagctctgggccagaaaggcaatttggctaaaaaatgaataagactacttctaatgtaactaagcatctccactatggtgtgtgccttttataaaggaaaaaaaaaaaaaaagg

SEQ ID NO: 38 - protein, 1115 aa, Homo sapiens
MRRLSLWWLLSRVCLLLPPPCALVLAGVPSSSSHPQPCQILKRIGHAVRVGAVHLQPWTTAPRAASRAPDDSRAGAQRDEPEPGTRRSPAPSPGARWLGSTLHGRGPPGSRKPGEGARAEALWPRDALLFAVDNLNRVEGLLPYNLSLEVVMAIEAGLGDLPLLPFSSPSSPWSSDPFSFLQSVCHTVVVQGVSALLAFPQSQGEMMELDLVSLVLHIPVISIVRHEFPRESQNPLHLQLSLENSLSSDADVTVSILTMNNWYNFSLLLCQEDWNITDFLLLTQNNSKFHLGSIINITANLPSTQDLLSFLQIQLESIKNSTPTVVMFGCDMESIRRIFEITTQFGVMPPELRWVLGDSQNMEELRTEGLPLGLIAHGKTTQSVFEHYVQDAMELVARAVATATMIQPELALIPSTMNCMEVETTNLTSGQYLSRFLANTTFRGLSGSIRVKGSTIVSSENNFFIWNLQHDPMGKPMWTRLGSWQGRKIVMDYGIWPEQAQRHKTHFQHPSKLHLRVVTLIEHPFVFTREVDDEGLCPAGQLCLDPMTNDSSTLDSLFSSLHSSNDTVPIKFKKCCYGYCIDLLEKIAEDMNFDFDLYIVGDGKYGAWKNGHWTGLVGDLLRGTAHMAVTSFSINTARSQVIDFTSPFFSTSLGILVRTRDTAAPIGAFMWPLHWTMWLGIFVALHITAVFLTLYEWKSPFGLTPKGRNRSKVFSFSSALNICYALLFGRTVAIKPPKCWTGRFLMNLWAIFCMFCLSTYTANLAAVMVGEKIYEELSGIHDPKLHHPSQGFRFGTVRESSAEDYVRQSFPEMHEYMRRYNVPATPDGVEYLKNDPEKLDAFIMDKALLDYEVSIDADCKLLTVGKPFAIEGYGIGLPPNSPLTANISELISQYKSHGFMDMLHDKWYRVVPCGKRSFAVTETLQMGIKHFSGLFVLLCIGFGLSILTTIGEHIVYRLLLPRIKNKSKLQYWLHTSQRLHRAINTSFIEEKQQHFKTKRVEKRSNVGPRQLTVWNTSNLSHDNRRKYIFSDEEGQNQLGIQIHQDIPLPPRRRELPALRTTNGKADSLNVSRNSVMQELSELEKQIQVIRQELQLAVSRKTELEEYQRTSRTCES

SEQ ID NO: 39 - DNA, 3345 bp, Homo sapiens
  CDS (1)...(3345)
atgaggagactgagtttgtggtggctgctgagcagggtctgtctgctgttgccgccgccctgcgcactggtgctggccggggtgcccagctcctcctcgcacccgcagccctgccagatcctcaagcgcatcgggcacgcggtgagggtgggcgcggtgcacttgcagccctggaccaccgccccccgcgcggccagccgcgctccggacgacagccgagcaggagcccagagggatgagccggagccagggactaggcggtccccggcgccctcgccgggcgcacgctggttggggagcaccctgcatggccgggggccgccgggctcccgtaagcccggggagggcgccagggcggaggccctgtggccacgggacgccctcctatttgccgtggacaacctgaaccgcgtggaagggctgctaccctacaacctgtctttggaagtagtgatggccatcgaggcaggcctgggcgatctgccacttttgcccttctcctcccctagttcgccatggagcagtgaccctttctccttcctgcaaagtgtgtgccataccgtggtggtgcaaggggtgtcggcgctgctcgccttcccccagagccagggcgaaatgatggagctcgacttggtcagcttagtcctgcacattccagtgatcagcatcgtgcgccacgagtttccgcgggagagtcagaatccccttcacctacaactgagtttagaaaattcattaagttctgatgctgatgtcactgtctcaatcctgaccatgaacaactggtacaattttagcttgttgctgtgccaggaagactggaacatcaccgacttcctcctccttacccagaataattccaagttccaccttggttctatcatcaacatcaccgctaacctcccctccacccaggacctcttgagcttcctacagatccagcttgagagtattaagaacagcacacccacagtggtgatgtttggctgcgacatggaaagtatccggcggattttcgaaattacaacccagtttggggtcatgccccctgaacttcgttgggtgctgggagattcccagaatatggaggaactgaggacagagggtctgcccttaggactcattgctcatggaaaaacaacacagtctgtctttgagcactacgtacaagatgctatggagctggtcgcaagagctgtagccacagccaccatgatccaaccagaacttgctctcattcccagcacgatgaactgcatggaggtggaaactacaaatctcacttcaggacaatatttatcaaggtttctagccaataccactttcagaggcctcagtggttccattagagtaaaaggttccaccatcgtcagctcagaaaacaactttttcatctggaatcttcaacatgaccccatgggaaagccaatgtggacccgcttgggcagctggcaggggagaaagattgtcatggactatggaatatggccagagcaggcccagagacacaaaacccacttccaacatccaagtaagctacacttgagagtggttaccctgattgagcatccttttgtcttcacaagggaggtagatgatgaaggcttgtgccctgctggccaactctgtctagaccccatgactaatgactcttccacactggacagcctttttagcagcctccatagcagtaatgatacagtgcccattaaattcaagaagtgctgctatggatattgcattgatctgctggaaaagatagcagaagacatgaactttgacttcgacctctatattgtaggggatggaaagtatggagcatggaaaaatgggcactggactgggctagtgggtgatctcctgagagggactgcccacatggcagtcacttcctttagcatcaatactgcacggagccaggtgatagacttcaccagccctttcttctccaccagcttgggcatcttagtgaggacccgagatacagcagctcccattggagccttcatgtggccactccactggacaatgtggctggggatttttgtggctctgcacatcactgccgtcttcctcactctgtatgaatggaagagtccatttggtttgactcccaaggggcgaaatagaagtaaagtcttctccttttcttcagccttgaacatctgttatgccctcttgtttggcagaacagtggccatcaaacctccaaaatgttggactggaaggtttctaatgaacctttgggccattttctgtatgttttgcctttccacatacacggcaaacttggctgctgtcatggtaggtgagaagatctatgaagagctttctggaatacatgaccccaagttacatcatccttcccaaggattccgctttggaactgtccgagaaagcagtgctgaagattatgtgagacaaagtttcccagagatgcatgaatatatgagaaggtacaatgttccagccacccctgatggagtggagtatctgaagaatgatccagagaaactagacgccttcatcatggacaaagcccttctggattatgaagtgtcaatagatgctgactgcaaacttctcactgtggggaagccatttgccatagaaggatacggcattggcctcccacccaactctccattgaccgccaacatatccgagctaatcagtcaatacaagtcacatgggtttatggatatgctccatgacaagtggtacagggtggttccctgtggcaagagaagttttgctgtcacggagactttgcaaatgggcatcaaacacttctctgggctctttgtgctgctgtgcattggatttggtctgtccattttgaccaccattggtgagcacatagtatacaggctgctgctaccacgaatcaaaaacaaatccaagctgcaatactggctccacaccagccagagattacacagagcaataaatacatcatttatagaggaaaagcagcagcatttcaagaccaaacgtgtggaaaagaggtctaatgtgggaccccgtcagcttaccgtatggaatacttccaatctgagtcatgacaaccgacggaaatacatctttagtgatgaggaaggacaaaaccagctgggcatccagatccaccaggacatccccctccctccaaggagaagagagctccctgccttgcggaccaccaatgggaaagcagactccctaaatgtatctcggaactcagtgatgcaggaactctcagagctcgagaagcagattcaggtgatccgtcaggagctgcagctggctgtgagcaggaaaacggagctggaggagtatcaaaggacaagtcggacttgtgagtcc

SEQ ID NO: 40 - DNA, 1262 bp, Homo sapiens
  CDS (15)..(1136)
ccttgctggcggccatgaagaggcagaacgtgcggactctgtccctcatcgtctgcaccttcacctacctgctggtgggcgccgccgtgttcgacgccctcgagtcggaccacgagatgcgcgaggaggagaaactcaaagccgaggagatccggatcaaggggaagtacaacatcagcagcgaggactaccggcagctggagctggtgatcctgcagtcggaaccgcaccgcgccggcgtccagtggaaattcgccggctccttctactttgcgatcacggtcatcaccaccataggttatgggcacgctgcacctggcaccgatgcgggcaaggccttctgcatgttctacgccgtgctgggcatcccgctgacactggtcatgtttcagagcctgggcgagcgcatgaacaccttcgtgcgctacctgctgaagcgcattaagaagtgctgtggcatgcgcaacactgacgtgtctatggagaacatggtgactgtgggcttcttctcctgcatggggacgctgtgcatcggggcggccgccttctcccagtgtgaggagtggagcttcttccacgcctactactactgcttcatcacgttgactaccattgggttcggggactacgtggccctgcagaccaagggcgccctgcagaagaagccgctctacgtggcctttagctttatgtatatcctggtggggctgacggtcatcggggccttcctcaacctggtcgtcctcaggttcttgaccatgaacagtgaggatgagcggcgggatgctgaagagagggcatccctcgccggaaaccgcaacagcatggtcattcacatccctgaggagccgcggcccagccggcccaggtacaaggcggacgtcccggacctgcagtctgtgtgctcctgcacctgctaccgctcgcaggactatggcggccgctcggtggcaccgcagaactccttcagcgccaagcttgccccccactacttccactccatctcttacaagatcgaggagatctcaccaagcacattaaaaaacagcctcttcccatcgcctattagctccatctctcctgggttacacagctttaccgaccaccagaggctgatgaaacgccggaagtccgtttaggggaactaactgcacattcaagagaggcgtccgtggatgctgggtctcactgccaaagccgaacacggcttcgggatttcttgccttctcaagtggacctcttgctgtgctgggcggaatgcc

SEQ ID NO: 41 - protein, 374 aa, Homo sapiens
MKRQNVRTLSLIVCTFTYLLVGAAVFDALESDHEMREEEKLKAEEIRIKGKYNISSEDYRQLELVILQSEPHRAGVQWKFAGSFYFAITVITTIGYGHAAPGTDAGKAFCMFYAVLGIPLTLVMFQSLGERMNTFVRYLLKRIKKCCGMRNTDVSMENMVTVGFFSCMGTLCIGAAAFSQCEEWSFFHAYYYCFITLTTIGFGDYVALQTKGALQKKPLYVAFSFMYILVGLTVIGAFLNLVVLRFLTMNSEDERRDAEERASLAGNRNSMVIHIPEEPRPSRPRYKADVPDLQSVCSCTCYRSQDYGGRSVAPQNSFSAKLAPHYFHSISYKIEEISPSTLKNSLFPSPISSISPGLHSFTDHQRLMKRRKSV

SEQ ID NO: 42 - DNA, 1122 bp, Homo sapiens
  CDS (1)..(1122)
atgaagaggcagaacgtgcggactctgtccctcatcgtctgcaccttcacctacctgctggtgggcgccgccgtgttcgacgccctcgagtcggaccacgagatgcgcgaggaggagaaactcaaagccgaggagatccggatcaaggggaagtacaacatcagcagcgaggactaccggcagctggagctggtgatcctgcagtcggaaccgcaccgcgccggcgtccagtggaaattcgccggctccttctactttgcgatcacggtcatcaccaccataggttatgggcacgctgcacctggcaccgatgcgggcaaggccttctgcatgttctacgccgtgctgggcatcccgctgacactggtcatgtttcagagcctgggcgagcgcatgaacaccttcgtgcgctacctgctgaagcgcattaagaagtgctgtggcatgcgcaacactgacgtgtctatggagaacatggtgactgtgggcttcttctcctgcatggggacgctgtgcatcggggcggccgccttctcccagtgtgaggagtggagcttcttccacgcctactactactgcttcatcacgttgactaccattgggttcggggactacgtggccctgcagaccaagggcgccctgcagaagaagccgctctacgtggcctttagctttatgtatatcctggtggggctgacggtcatcggggccttcctcaacctggtcgtcctcaggttcttgaccatgaacagtgaggatgagcggcgggatgctgaagagagggcatccctcgccggaaaccgcaacagcatggtcattcacatccctgaggagccgcggcccagccggcccaggtacaaggcggacgtcccggacctgcagtctgtgtgctcctgcacctgctaccgctcgcaggactatggcggccgctcggtggcaccgcagaactccttcagcgccaagcttgccccccactacttccactccatctcttacaagatcgaggagatctcaccaagcacattaaaaaacagcctcttcccatcgcctattagctccatctctcctgggttacacagctttaccgaccaccagaggctgatgaaacgccggaagtccgtt

SEQ ID NO: 43 - DNA, 5289 bp, Homo sapiens
  CDS (107)...(3775)
gcggccgcccctctggctgctctgcctggtcgcgtgctggctcctgggcgccggggccgaagccgacttctccatcctggacgaggcgcaagtgctggcgagccagatgcggaggctggcggccgaggagctgggggtcgtcaccatgcagcggatattcaactcctttgtttacactgagaaaatctcaaatggagaaagtgaagtacagcagctagccaaaaaaatccgagagaagttcaaccgttacttggatgtggtcaatcggaacaagcaagttgtagaagcatcctatacggctcacctaacctctcccctaactgcaattcaagactgctgtactatcccaccttccatgatggaattcgatgggaactttaataccaatgtgtctagaacaattagttgtgatcgactttctactactgttaatagccgggccttcaatccaggacgagacttaaattcagttcttgcagacaacctgaaatccaaccctggaattaagtggcaatatttcagttcagaagaaggaattttcactgttttcccagcacacaagttccggtgtaagggcagctacgaacaccgcagtagacccatctacgtctctacagtccggccgcagtcaaagcacatagtagtgattctggaccacggggcttcagtcacagacactcagcttcagattgccaaggacgctgctcaggtcatcctcagcgccatcgatgaacatgacaagatttctgtgttaactgtggcagataccgtccggacttgctcactagaccagtgctataagaccttcttgtctccagccaccagtgagacaaaaaggaaaatgtccacctttgttagcagcgtgaagtcttcagacagtcctacccagcacgcagtgggattccaaaaggcatttcagctgattcgaagtacaaacaataacacaaagttccaagcaaatacagacatggtcatcatttacctgtcagctggcattacatcaaaggactcttcggaagaagataaaaaagcgactctccaagtcatcaatgaagaaaatagctttctaaacaactctgtaatgattctcacctatgccctcatgaacgatggggtgactggtttgaaagagctggcttttctgagggatctagctgaacagaattcagggaagtacggtgtgccagaccggacggccttgcctgtgattaagggcagcatgatggtgctgaatcagttgagcaacctggagaccacagtgggcaggttctacacaaaccttcccaaccggatgattgatgaagccgtcttcagcctgcccttctctgatgagatgggagatggtttgataatgactgtgagtaaaccctgttattttggaaacctacttctgggaattgtaggtgtggacgtggatctggcttacattcttgaagacgtgacgtattaccaagactctttggcttcctatacttttctcatagacgacaaaggatatacacttatgcacccatctcttaccaggccatatttattgtcagagcccccacttcatactgacatcatacattatgaaaatattccaaaatttgaattagttcggcaaaatatcctaagcctccctctgggcagccagattatcgcagtccctgtgaactcatccctgtcttggcacataaacaagctgagagaaactggaaaggaagcctacaatgttagctatgcctggaagatggtacaagacacttcctttattctgtgtattgtggtgatacaaccagaaatacctgtgaaacaactgaagaacctcaacactgttcccagcagcaagctgctgtaccaccggctggatctccttggccagcccagtgcttgcctctacttcaaacagctggcaaccctagaaagtcccaccatcatgctgtctgctggcagcttttcctccccctatgagcacctcagccagccagagacaaagcgcatggtagagcactacaccgcctatctcagcgacaacacccgcctcattgctaacccgggcctcaaattctctgtcagaaatgaagtaatggctaccagccacgtcacagatgaatggatgacacaaatggaaatgagtagcctgaacacttacattgtccgccgttacatagcaacacccaatggcgtcctcagaatttatcctggttccctcatggacaaagcatttgatcccactaggagacaatggtatctccatgcagtagctaatccagggttgatttctttgactggtccttacttagatgttggaggagctggttatgttgtgacaatcagtcacacaattcattcatccagtacacagctgtcttctgggcacactgtggctgtgatgggcattgacttcacactcagatacttctacaaagttctgatggacctattacctgtctgtaaccaagatggtggcaacaaaataaggtgcttcataatggaggacaggggttatctggtggcgcacccgactctcatcgaccccaaaggacatgcacctgtggagcagcagcacatcacccacaaggagcccctggtagcaaatgatatcctcaaccaccccaactttgtaaagaaaaacctgtgcaacagcttcagtgacagaacggtccagaggttttataaattcaacaccagccttgcgggggatttgacgaaccttgtgcatggcagccactgttccaaatacagattagcaaggatcccaggaaccaacgcgtttgttggcattgtcaacgaaacctgcgactctcttgccttctgtgcctgcagcatggtggaccgactctgtctcaactgtcaccgaatggaacaaaatgaatgtgaatgtccttgtgagtgccctctagaggtcaatgagtgcactggcaacctcaccaatgcagagaaccgaaaccccagctgcgaggtccaccaggagccggtgacatacacagctattgaccctggcctgcaagatgctcttcaccagtgtgtcaacagcaggtgcagtcagaggctggaaagtggggactgttttggggtgctggattgtgaatggtgcatggtggacagtgatggaaagactcacctggacaaaccctactgtgccccccagaaagaatgcttcggggggattgtgggagccaaaagtccctacgttgatgacatgggagcaataggtgatgaggtgatcacattaaacatgattaaaagcgcccctgtgggtcctgtggctggagggatcatgggatgcatcatggtcttggtcctggcggtgtatgcctaccgccaccagattcatcgccggagccatcagcatatgtctcctcttgctgcccaagaaatgtcagtgcgtatgtccaacctggagaatgacagagatgaaagggacgacgacagccacgaagacagaggcatcatcagcaacactcggtttatagctgcggtcatcgaacgacatgcacacagtccagaaagaaggcgccgctactggggtcgatcaggaacagaaagtgatcatggttacagcaccatgagcccacaggaggacagtgaaaatcctccatgcaacaatgaccccttgtcagccggggtcgatgtgggaaaccatgatgaggacttagacctggataccccccctcagactgctgccctactaagtcacaagttccaccactaccggtcacaccaccctacacttcatcatagccaccacttacaggcggccgtcacggtacacactgtcgatgcagaatgctaacaatctcctcacctccacgccaagatgagatctgggagctacagaatgttctggaaagaaaaagaaccggcttaaaacccacagcaagagacctcccttgtgtttgtgctttgtgcagagttgtttgagtcatttcctgcctgtcgacatggttaaaaacgagagaaacaacaacacagtcacatttgtgaagatgtgaggctggttctgaaatggaggggaaataagcctgatgaacagacctgccataacactaatggaaggtaacagaaggcgaacctccaaacacagagacggaacctgcaagtgaagctgagccagaggaatgttccaaagagccagaagcattcagctctccttaactggaagagagaaaaatctgctcacccagagactggaatgtggcacatgcagatacaaatgtgtgcattgaagatttcgctttgtttcttagcggtacctggataccacagttgctgtatggaactcatgttatgctctaaacgatgcatctcagaatttctaagtaaaggattatttttctactatttattgaactttcaaacattctcaaactttggggaaaaggaaaggaaacacaggagaagttttcagcagttgccccgagctgttttgtgtgtaatgaagtggttctttgattaaggagctctatttcttatttaactgatatcccactgccccactccacaaaataggaaaatgaagaaatctttctctctgacttgtttacatcatttcacggaaacacatctttgtttgtaatgcagtattctttctctgtgtttgacagagatggggaggggcagaggaatttaagaggttttaaaagaaatgttatgtttcttatgacttgtttccactcctcgtacaatgctattcttaggtttctacgaaacctaatgttagaaccgcatcctttcagctaagggagggttggatttattttccttgttttagagactacaaatttttaaatatcccattttgactgagaatattgacatataagggaagaagttttctaaattgtgaaagtctggttcttaattaaagaattttttttttaatatcacggttaaaagctgctgccagttagccaagacattatccaccaaattgctttgtgatttatacagggattaatcaaatctggctactataacatggggcattgtaactttaaagtagtgttttaattacagtgatgtattttagactcacattttgtgattcaaatatgttataaaggcattcttgcaccatggtaaagaatgtgtgtggtaaatctccgtttatatgtagttggaaaaaattcactgaataatgttttaatgatagggtattatgatacaatgtaaaaaacaattggttcttcagcagtacagaaagtaaactatatatgtgctatcaggaaaccccttcatactgtgtataaaattgcaatctagtgaaataaactgtatgcaatggaaaaaaaaaaaaaaagggcg

SEQ ID NO: 44 - protein, 1223 aa, Homo sapiens
MRRLAAEELGVVTMQRIFNSFVYTEKISNGESEVQQLAKKIREKFNRYLDVVNRNKQVVEASYTAHLTSPLTAIQDCCTIPPSMMEFDGNFNTNVSRTISCDRLSTTVNSRAFNPGRDLNSVLADNLKSNPGIKWQYFSSEEGIFTVFPAHKFRCKGSYEHRSRPIYVSTVRPQSKHIVVILDHGASVTDTQLQIAKDAAQVILSAIDEHDKISVLTVADTVRTCSLDQCYKTFLSPATSETKRKMSTFVSSVKSSDSPTQHAVGFQKAFQLIRSTNNNTKFQANTDMVIIYLSAGITSKDSSEEDKKATLQVINEENSFLNNSVMILTYALMNDGVTGLKELAFLRDLAEQNSGKYGVPDRTALPVIKGSMMVLNQLSNLETTVGRFYTNLPNRMIDEAVFSLPFSDEMGDGLIMTVSKPCYFGNLLLGIVGVDVDLAYILEDVTYYQDSLASYTFLIDDKGYTLMHPSLTRPYLLSEPPLHTDIIHYENIPKFELVRQNILSLPLGSQIIAVPVNSSLSWHINKLRETGKEAYNVSYAWKMVQDTSFILCIVVIQPEIPVKQLKNLNTVPSSKLLYHRLDLLGQPSACLYFKQLATLESPTIMLSAGSFSSPYEHLSQPETKRMVEHYTAYLSDNTRLIANPGLKFSVRNEVMATSHVTDEWMTQMEMSSLNTYIVRRYIATPNGVLRIYPGSLMDKAFDPTRRQWYLHAVANPGLISLTGPYLDVGGAGYVVTISHTIHSSSTQLSSGHTVAVMGIDFTLRYFYKVLMDLLPVCNQDGGNKIRCFIMEDRGYLVAHPTLIDPKGHAPVEQQHITHKEPLVANDILNHPNFVKKNLCNSFSDRTVQRFYKFNTSLAGDLTNLVHGSHCSKYRLARIPGTNAFVGIVNETCDSLAFCACSMVDRLCLNCHRMEQNECECPCECPLEVNECTGNLTNAENRNPSCEVHQEPVTYTAIDPGLQDALHQCVNSRCSQRLESGDCFGVLDCEWCMVDSDGKTHLDKPYCAPQKECFGGIVGAKSPYVDDMGAIGDEVITLNMIKSAPVGPVAGGIMGCIMVLVLAVYAYRHQIHRRSHQHMSPLAAQEMSVRMSNLENDRDERDDDSHEDRGIISNTRFIAAVIERHAHSPERRRRYWGRSGTESDHGYSTMSPQEDSENPPCNNDPLSAGVDVGNHDEDLDLDTPPQTAALLSHKFHHYRSHHPTLHHSHHLQAAVTVHTVDAEC

SEQ ID NO: 45 - DNA, 3669 bp, Homo sapiens
  CDS (1)...(3669)
atgcggaggctggcggccgaggagctgggggtcgtcaccatgcagcggatattcaactcctttgtttacactgagaaaatctcaaatggagaaagtgaagtacagcagctagccaaaaaaatccgagagaagttcaaccgttacttggatgtggtcaatcggaacaagcaagttgtagaagcatcctatacggctcacctaacctctcccctaactgcaattcaagactgctgtactatcccaccttccatgatggaattcgatgggaactttaataccaatgtgtctagaacaattagttgtgatcgactttctactactgttaatagccgggccttcaatccaggacgagacttaaattcagttcttgcagacaacctgaaatccaaccctggaattaagtggcaatatttcagttcagaagaaggaattttcactgttttcccagcacacaagttccggtgtaagggcagctacgaacaccgcagtagacccatctacgtctctacagtccggccgcagtcaaagcacatagtagtgattctggaccacggggcttcagtcacagacactcagcttcagattgccaaggacgctgctcaggtcatcctcagcgccatcgatgaacatgacaagatttctgtgttaactgtggcagataccgtccggacttgctcactagaccagtgctataagaccttcttgtctccagccaccagtgagacaaaaaggaaaatgtccacctttgttagcagcgtgaagtcttcagacagtcctacccagcacgcagtgggattccaaaaggcatttcagctgattcgaagtacaaacaataacacaaagttccaagcaaatacagacatggtcatcatttacctgtcagctggcattacatcaaaggactcttcggaagaagataaaaaagcgactctccaagtcatcaatgaagaaaatagctttctaaacaactctgtaatgattctcacctatgccctcatgaacgatggggtgactggtttgaaagagctggcttttctgagggatctagctgaacagaattcagggaagtacggtgtgccagaccggacggccttgcctgtgattaagggcagcatgatggtgctgaatcagttgagcaacctggagaccacagtgggcaggttctacacaaaccttcccaaccggatgattgatgaagccgtcttcagcctgcccttctctgatgagatgggagatggtttgataatgactgtgagtaaaccctgttattttggaaacctacttctgggaattgtaggtgtggacgtggatctggcttacattcttgaagacgtgacgtattaccaagactctttggcttcctatacttttctcatagacgacaaaggatatacacttatgcacccatctcttaccaggccatatttattgtcagagcccccacttcatactgacatcatacattatgaaaatattccaaaatttgaattagttcggcaaaatatcctaagcctccctctgggcagccagattatcgcagtccctgtgaactcatccctgtcttggcacataaacaagctgagagaaactggaaaggaagcctacaatgttagctatgcctggaagatggtacaagacacttcctttattctgtgtattgtggtgatacaaccagaaatacctgtgaaacaactgaagaacctcaacactgttcccagcagcaagctgctgtaccaccggctggatctccttggccagcccagtgcttgcctctacttcaaacagctggcaaccctagaaagtcccaccatcatgctgtctgctggcagcttttcctccccctatgagcacctcagccagccagagacaaagcgcatggtagagcactacaccgcctatctcagcgacaacacccgcctcattgctaacccgggcctcaaattctctgtcagaaatgaagtaatggctaccagccacgtcacagatgaatggatgacacaaatggaaatgagtagcctgaacacttacattgtccgccgttacatagcaacacccaatggcgtcctcagaatttatcctggttccctcatggacaaagcatttgatcccactaggagacaatggtatctccatgcagtagctaatccagggttgatttctttgactggtccttacttagatgttggaggagctggttatgttgtgacaatcagtcacacaattcattcatccagtacacagctgtcttctgggcacactgtggctgtgatgggcattgacttcacactcagatacttctacaaagttctgatggacctattacctgtctgtaaccaagatggtggcaacaaaataaggtgcttcataatggaggacaggggttatctggtggcgcacccgactctcatcgaccccaaaggacatgcacctgtggagcagcagcacatcacccacaaggagcccctggtagcaaatgatatcctcaaccaccccaactttgtaaagaaaaacctgtgcaacagcttcagtgacagaacggtccagaggttttataaattcaacaccagccttgcgggggatttgacgaaccttgtgcatggcagccactgttccaaatacagattagcaaggatcccaggaaccaacgcgtttgttggcattgtcaacgaaacctgcgactctcttgccttctgtgcctgcagcatggtggaccgactctgtctcaactgtcaccgaatggaacaaaatgaatgtgaatgtccttgtgagtgccctctagaggtcaatgagtgcactggcaacctcaccaatgcagagaaccgaaaccccagctgcgaggtccaccaggagccggtgacatacacagctattgaccctggcctgcaagatgctcttcaccagtgtgtcaacagcaggtgcagtcagaggctggaaagtggggactgttttggggtgctggattgtgaatggtgcatggtggacagtgatggaaagactcacctggacaaaccctactgtgccccccagaaagaatgcttcggggggattgtgggagccaaaagtccctacgttgatgacatgggagcaataggtgatgaggtgatcacattaaacatgattaaaagcgcccctgtgggtcctgtggctggagggatcatgggatgcatcatggtcttggtcctggcggtgtatgcctaccgccaccagattcatcgccggagccatcagcatatgtctcctcttgctgcccaagaaatgtcagtgcgtatgtccaacctggagaatgacagagatgaaagggacgacgacagccacgaagacagaggcatcatcagcaacactcggtttatagctgcggtcatcgaacgacatgcacacagtccagaaagaaggcgccgctactggggtcgatcaggaacagaaagtgatcatggttacagcaccatgagcccacaggaggacagtgaaaatcctccatgcaacaatgaccccttgtcagccggggtcgatgtgggaaaccatgatgaggacttagacctggataccccccctcagactgctgccctactaagtcacaagttccaccactaccggtcacaccaccctacacttcatcatagccaccacttacaggcggccgtcacggtacacactgtcgatgcagaatgc

SEQ ID NO: 46 - DNA, 2725 bp, Homo sapiens
  CDS (180)...(2033)
ccacgcgtccggccttccgaaatagaaacaaagttggtcacaaatcacattagctttgcccgaagtttttccccacactcttctttagcatgctattatggggaaagtgaccactcctgggagcgggggtggtcggggcggtttggtggcggggaagcggctgtaacttctacgtgaccatggtacctgttgaaaacaccgagggccccagtctgctgaaccagaaggggacagccgtggagacggagggcagcggcagccggcatcctccctgggcgagaggctgcggcatgtttaccttcctgtcatctgtcactgctgctgtcagtggcctcctggtgggttatgaacttgggatcatctctggggctcttcttcagatcaaaaccttattagccctgagctgccatgagcaggaaatggttgtgagctccctcgtcattggagccctccttgcctcactcaccggaggggtcctgatagacagatatggaagaaggacagcaatcatcttgtcatcctgcctgcttggactcggaagcttagtcttgatcctcagtttatcctacacggttcttatagtgggacgcattgccataggggtctccatctccctctcttccattgccacttgtgtttacatcgcagagattgctcctcaacacagaagaggccttcttgtgtcactgaatgagctgatgattgtcatcggcattctttctgcctatatttcaaattacgcatttgccaatgttttccatggctggaagtacatgtttggtcttgtgattcccttgggagttttgcaagcaattgcaatgtattttcttcctccaagccctcggtttctggtgatgaaaggacaagagggagctgctagcaaggttcttggaaggttaagagcactctcagatacaactgaggaactcactgtgatcaaatcctccctgaaagatgaatatcagtacagtttttgggatctgtttcgttcaaaagacaacatgcggacccgaataatgataggactaacactagtattttttgtacaaatcactggccaaccaaacatattgttctatgcatcaactgttttgaagtcagttggatttcaaagcaatgaggcagctagcctcgcctccactggggttggagtcgtcaaggtcattagcaccatccctgccactcttcttgtagaccatgtcggcagcaaaacattcctctgcattggctcctctgtgatggcagcttcgttggtgaccatgggcatcgtaaatctcaacatccacatgaacttcacccatatctgcagaagccacaattctatcaaccagtccttggatgagtctgtgatttatggaccaggaaacctgtcaaccaacaacaatactctcagagaccacttcaaagggatttcttcccatagcagaagctcactcatgcccctgagaaatgatgtggataagagaggggagacgacctcagcatccttgctaaatgctggattaagccacactgaataccagatagtcacagaccctggggacgtcccagcttttttgaaatggctgtccttagccagcttgcttgtttatgttgctgctttttcaattggtctaggaccaatgccctggctggtgctcagcgagatctttcctggtgggatcagaggacgagccatggctttaacttctagcatgaactggggcatcaatctcctcatctcgctgacatttttgactgtaactgatcttattggcctgccatgggtgtgctttatatatacaatcatgagtctagcatccctgctttttgttgttatgtttatacctgagacaaagggatgctctttggaacaaatatcaatggagctagcaaaagtgaactatgtgaaaaacaacatttgttttatgagtcatcaccaagaagaattagtgccaaaacagcctcaaaaaagaaaaccccaggagcagctcttggagtgtaacaagctgtgtggtaggggccaatccaggcagctttctccagagacctaatggcctcaacaccttctgaacgtggatagtgccagaacacttaggagggtgtctttggaccaatgcatagttgcgactcctgtgctctcttttcagtgtcatggaactggttttgaagagacactctgaaatgataaagacagcctttaatccccctcctccccagaaggaacctcaaaaggtagatgaggtacaaggtcctaagtgatctctttttctgagcaggatatcaggttaaaaaaaaaaagttactggctggtttaatactttctaccttcttcacagagcagcctttgaatagactatgtcctagtgaagacatcaacctccgccttaagctatgtatgtatggaggccagtcgcagctttattatgcagacacacaagtggtctggacatgagggtacagtttctgcctaccaagacactacttgcactggatcttacgcaaaaaagaaccagaacacacagtgtggacaactgcccatatattctatctagattaggagagggtcctggctaggattttagtggtaattcctagttacattcaacaagtataaagattatagagcttattttatgaactataaactataatttaatgcaaaatatccttttatgaatttcatgttaatattgtgaaatattaaaataattccgcaataaaaaaaaaaaaaaagggcggccgc

SEQ ID NO: 47 - protein, 617 aa, Homo sapiens
MVPVENTEGPSLLNQKGTAVETEGSGSRHPPWARGCGMFTFLSSVTAAVSGLLVGYELGIISGALLQIKTLLALSCHEQEMVVSSLVIGALLASLTGGVLIDRYGRRTAIILSSCLLGLGSLVLILSLSYTVLIVGRIAIGVSISLSSIATCVYIAEIAPQHRRGLLVSLNELMIVIGILSAYISNYAFANVFHGWKYMFGLVIPLGVLQAIAMYFLPPSPRFLVMKGQEGAASKVLGRLRALSDTTEELTVIKSSLKDEYQYSFWDLFRSKDNMRTRIMIGLTLVFFVQITGQPNILFYASTVLKSVGFQSNEAASLASTGVGVVKVISTIPATLLVDHVGSKTFLCIGSSVMAASLVTMGIVNLNIHMNFTHICRSHNSINQSLDESVIYGPGNLSTNNNTLRDHFKGISSHSRSSLMPLRNDVDKRGETTSASLLNAGLSHTEYQIVTDPGDVPAFLKWLSLASLLVYVAAFSIGLGPMPWLVLSEIFPGGIRGRAMALTSSMNWGINLLISLTFLTVTDLIGLPWVCFIYTIMSLASLLFVVMFIPETKGCSLEQISMELAKVNYVKNNICFMSHHQEELVPKQPQKRKPQEQLLECNKLCGRGQSRQLSPET

SEQ ID NO: 48 - DNA, 1854 bp, Homo sapiens
  CDS (1)...(1854)
atggtacctgttgaaaacaccgagggccccagtctgctgaaccagaaggggacagccgtggagacggagggcagcggcagccggcatcctccctgggcgagaggctgcggcatgtttaccttcctgtcatctgtcactgctgctgtcagtggcctcctggtgggttatgaacttgggatcatctctggggctcttcttcagatcaaaaccttattagccctgagctgccatgagcaggaaatggttgtgagctccctcgtcattggagccctccttgcctcactcaccggaggggtcctgatagacagatatggaagaaggacagcaatcatcttgtcatcctgcctgcttggactcggaagcttagtcttgatcctcagtttatcctacacggttcttatagtgggacgcattgccataggggtctccatctccctctcttccattgccacttgtgtttacatcgcagagattgctcctcaacacagaagaggccttcttgtgtcactgaatgagctgatgattgtcatcggcattctttctgcctatatttcaaattacgcatttgccaatgttttccatggctggaagtacatgtttggtcttgtgattcccttgggagttttgcaagcaattgcaatgtattttcttcctccaagccctcggtttctggtgatgaaaggacaagagggagctgctagcaaggttcttggaaggttaagagcactctcagatacaactgaggaactcactgtgatcaaatcctccctgaaagatgaatatcagtacagtttttgggatctgtttcgttcaaaagacaacatgcggacccgaataatgataggactaacactagtattttttgtacaaatcactggccaaccaaacatattgttctatgcatcaactgttttgaagtcagttggatttcaaagcaatgaggcagctagcctcgcctccactggggttggagtcgtcaaggtcattagcaccatccctgccactcttcttgtagaccatgtcggcagcaaaacattcctctgcattggctcctctgtgatggcagcttcgttggtgaccatgggcatcgtaaatctcaacatccacatgaacttcacccatatctgcagaagccacaattctatcaaccagtccttggatgagtctgtgatttatggaccaggaaacctgtcaaccaacaacaatactctcagagaccacttcaaagggatttcttcccatagcagaagctcactcatgcccctgagaaatgatgtggataagagaggggagacgacctcagcatccttgctaaatgctggattaagccacactgaataccagatagtcacagaccctggggacgtcccagcttttttgaaatggctgtccttagccagcttgcttgtttatgttgctgctttttcaattggtctaggaccaatgccctggctggtgctcagcgagatctttcctggtgggatcagaggacgagccatggctttaacttctagcatgaactggggcatcaatctcctcatctcgctgacatttttgactgtaactgatcttattggcctgccatgggtgtgctttatatatacaatcatgagtctagcatccctgctttttgttgttatgtttatacctgagacaaagggatgctctttggaacaaatatcaatggagctagcaaaagtgaactatgtgaaaaacaacatttgttttatgagtcatcaccaagaagaattagtgccaaaacagcctcaaaaaagaaaaccccaggagcagctcttggagtgtaacaagctgtgtggtaggggccaatccaggcagctttctccagagacctaa

SEQ ID NO: 49 - DNA, 2230 bp, Homo sapiens
  CDS (376)...(1962)
gtcgacccacgcgtccggcaacatggcggctgccgtggtgcagcgcccgggctgagcgacagcaagtgcagcgggctcctaccccgggtgaggggtggcctccgcgtgggatcgtgccctcttcagcccgctcctgtccccgacatcacgtgtattccgcacgtcccctccgcgctgtgtgtctactgagacggggaggcgtgacagggcccgggtcccttctcagtggtgctctgtgcttcagggcaagctccccgtctccgggcgcacttccctcgcctgtgttcggtccatcctcctttctccagcctcctcccctcgcaggtgggatcgtcggtgggaccggagcgcgggcgggcgcggccccccgggaccatggccgggtccgacaccgcgcccttcctcagccaggcggatgacccggacgacgggccagtgcctggcaccccggggttgccagggtccacggggaacccgaagtccgaggagcccgaggtcccggaccaggaggggctgcagcgcatcaccggcctgtctcccggccgttcggctctcatagtggcggtgctgtgctacatcaatctcctgaactacatggaccgcttcaccgtggctggcgtccttcccgacatcgagcagttcttcaacatcggggacagtagctctgggctcatccagaccgtgttcatctccagttacatggtgttggcacctgtgtttggctacctgggtgacaggtacaatcggaagtatctcatgtgcgggggcattgccttctggtccctggtgacactggggtcatccttcatccccggagagcatttctggctgctcctcctgacccggggcctggtgggggtcggggaggccagttattccaccatcgcgcccactctcattgccgacctctttgtggccgaccagcggagccggatgctcagcatcttctactttgccattccggtgggcagtggtctgggctacattgcaggctccaaagtgaaggatatggctggagactggcactgggctctgagggtgacaccgggtctaggagtggtggccgttctgctgctgttcctggtagtgcgggagccgccaaggggagccgtggagcgccactcagatttgccacccctgaaccccacctcgtggtgggcagatctgagggctctggcaagaaatcctagtttcgtcctgtcttccctgggcttcactgctgtggcctttgtcacgggctccctggctctgtgggctccggcattcctgctgcgttcccgcgtggtccttggggagaccccaccctgccttcccggagactcctgctcttcctctgacagtctcatctttggactcatcacctgcctgaccggagtcctgggtgtgggcctgggtgtggagatcagccgccggctccgccactccaacccccgggctgatcccctggtctgtgccactggcctcctgggctctgcacccttcctcttcctgtcccttgcctgcgcccgtggtagcatcgtggccacttatattttcatcttcattggagagaccctcctgtccatgaactgggccatcgtggccgacattctgctgtacgtggtgatccctacccgacgctccaccgccgaggccttccagatcgtgctgtcccacctgctgggtgatgctgggagcccctacctcattggcctgatctctgaccgcctgcgccggaactggcccccctccttcttgtccgagttccgggctctgcagttctcgctcatgctctgcgcgtttgttggggcactgggcggcgcagccttcctgggcaccgccatcttcattgaggccgaccgccggcgggcacagctgcacgtgcagggcctgctgcacgaagcagggtccacagacgaccggattgtggtgccccagcggggccgctccacccgcgtgcccgtggccagtgtgctcatctgagaggctgccgctcacctacctgcacatctgccacagctggccctgggcccaccccacgaagggcctgggcctaaccccttggcctggcccagcttccagagggaccctgggccgtgtgccagctcccagacactacatgggtagctcaggggaggaggtgggggtccaggagggggatccctctccacaggggcagccccaagggctcggtgctatttgtaacggaataaaatttgtagccagaaaaaaaaaaaaaaagggcggccgc

SEQ ID NO: 50 - protein, 528 aa, Homo sapiens
MAGSDTAPFLSQADDPDDGPVPGTPGLPGSTGNPKSEEPEVPDQEGLQRITGLSPGRSALIVAVLCYINLLNYMDRFTVAGVLPDIEQFFNIGDSSSGLIQTVFISSYMVLAPVFGYLGDRYNRKYLMCGGIAFWSLVTLGSSFIPGEHFWLLLLTRGLVGVGEASYSTIAPTLIADLFVADQRSRMLSIFYFAIPVGSGLGYIAGSKVKDMAGDWHWALRVTPGLGVVAVLLLFLVVREPPRGAVERHSDLPPLNPTSWWADLRALARNPSFVLSSLGFTAVAFVTGSLALWAPAFLLRSRVVLGETPPCLPGDSCSSSDSLIFGLITCLTGVLGVGLGVEISRRLRHSNPRADPLVCATGLLGSAPFLFLSLACARGSIVATYIFIFIGETLLSMNWAIVADILLYVVIPTRRSTAEAFQIVLSHLLGDAGSPYLIGLISDRLRRNWPPSFLSEFRALQFSLMLCAFVGALGGAAFLGTAIFIEADRRRAQLHVQGLLHEAGSTDDRIVVPQRGRSTRVPVASVLI

SEQ ID NO: 51 - DNA, 1587 bp, Homo sapiens
  CDS (1)...(1587)
atggccgggtccgacaccgcgcccttcctcagccaggcggatgacccggacgacgggccagtgcctggcaccccggggttgccagggtccacggggaacccgaagtccgaggagcccgaggtcccggaccaggaggggctgcagcgcatcaccggcctgtctcccggccgttcggctctcatagtggcggtgctgtgctacatcaatctcctgaactacatggaccgcttcaccgtggctggcgtccttcccgacatcgagcagttcttcaacatcggggacagtagctctgggctcatccagaccgtgttcatctccagttacatggtgttggcacctgtgtttggctacctgggtgacaggtacaatcggaagtatctcatgtgcgggggcattgccttctggtccctggtgacactggggtcatccttcatccccggagagcatttctggctgctcctcctgacccggggcctggtgggggtcggggaggccagttattccaccatcgcgcccactctcattgccgacctctttgtggccgaccagcggagccggatgctcagcatcttctactttgccattccggtgggcagtggtctgggctacattgcaggctccaaagtgaaggatatggctggagactggcactgggctctgagggtgacaccgggtctaggagtggtggccgttctgctgctgttcctggtagtgcgggagccgccaaggggagccgtggagcgccactcagatttgccacccctgaaccccacctcgtggtgggcagatctgagggctctggcaagaaatcctagtttcgtcctgtcttccctgggcttcactgctgtggcctttgtcacgggctccctggctctgtgggctccggcattcctgctgcgttcccgcgtggtccttggggagaccccaccctgccttcccggagactcctgctcttcctctgacagtctcatctttggactcatcacctgcctgaccggagtcctgggtgtgggcctgggtgtggagatcagccgccggctccgccactccaacccccgggctgatcccctggtctgtgccactggcctcctgggctctgcacccttcctcttcctgtcccttgcctgcgcccgtggtagcatcgtggccacttatattttcatcttcattggagagaccctcctgtccatgaactgggccatcgtggccgacattctgctgtacgtggtgatccctacccgacgctccaccgccgaggccttccagatcgtgctgtcccacctgctgggtgatgctgggagcccctacctcattggcctgatctctgaccgcctgcgccggaactggcccccctccttcttgtccgagttccgggctctgcagttctcgctcatgctctgcgcgtttgttggggcactgggcggcgcagccttcctgggcaccgccatcttcattgaggccgaccgccggcgggcacagctgcacgtgcagggcctgctgcacgaagcagggtccacagacgaccggattgtggtgccccagcggggccgctccacccgcgtgcccgtggccagtgtgctcatctga

SEQ ID NO: 52 - DNA, 4632 bp, Homo sapiens
  CDS (225)...(3581)
  misc_feature (4611): n = a,c,t, or g
cacgcgtccgcccacgcgtccgcccacgcgtccgagccccctttcaagccttagcttccggctccaagccgaccccctccccctccctgtccccttccccttctcccatccctctctcggccacagcgtcttgttagtcctctccctctactccgcaatattttctttctttctccctcctctcctccatttgttgtttgatgtttcccactctttgaggaaggatggttgatttggagagcgaagtgccccctctgcctcccaggtacaggtttcgagatttgctgctaggggaccaaggatggcaaaacgatgacagagtacaagttgaattctatatgaatgaaaatacatttaaagaaagactaaaattatttttcataaaaaaccagagatcaagtctaaggatacgcctgttcaatttttctctcaaattactaagctgcttattatacataatccgagtactactagaaaacccttcacaaggaaatgaatggtctcatatcttttgggtgaacagaagtctacctttgtggggcttacaggtttcagtggcattgataagtctgtttgaaacaatattacttggttatcttagttataagggaaacatctgggaacagattttacgaatacccttcatcttggaaataattaatgcagttcccttcattatctcaatattctggccttccttaaggaatctatttgtcccagtctttctgaactgttggcttgccaaacatgccttggaaaatatgattaatgatctacacagagccattcagcgtacacagtctgcaatgtttaatcaagttttgattttaatatctacattactatgccttatcttcacctgcatttgtgggatccaacatctggaacgaataggaaagaggctgaatctctttgactccctttatttctgcattgtgacgttttctactgtgggcttcggggatgtcactcctgaaacatggtcctccaagctttttgtagttgctatgatttgtgttgctcttgtggttctacccatacagtttgaacagctggcttatttgtggatggagagacaaaagtcaggaggaaactatagtcgacatagagctcaaactgaaaagcatgtcgtcctgtgtgtcagctcactgaagattgatttacttatggattttttaaatgaattctatgctcatcctaggctccaggattattatgtggtgattttgtgtcctactgaaatggatgtacaggttcgaagggtactgcagattccaatgtggtcccaacgagttatctaccttcaaggttcagcccttaaagatcaagacctattgagagcaaagatggatgacgctgaggcctgttttattctcagtagccgttgtgaagtggataggacatcatctgatcaccaaacaattttgagagcatgggctgtgaaagattttgctccaaattgtcctttgtatgtccagatattaaagcctgaaaataaatttcacatcaaatttgctgatcatgttgtttgtgaagaagagtttaaatacgccatgttagctttaaactgtatatgcccagcaacatctacacttattacactactggttcatacctctagagggcaagaaggccagcaatcgccagaacaatggcagaagatgtacggtagatgctccgggaatgaagtctaccacattgttttggaagaaagtacattttttgctgaatatgaaggaaagagttttacatatgcctctttccatgcacacaaaaagtttggcgtctgcttgattggtgttaggagggaggataataaaaacattttgctgaatccaggtcctcgatacattatgaattctacggacatatgcttttatattaatattaccaaagaagagaattcagcatttaaaaaccaagaccagcagagaaaaagcaatgtgtccaggtcgttttatcatggaccttccagattacctgtacatagcataattgccagcatgggtactgtggctatagacctgcaagatacaagctgtagatcagcaagtggccctaccctgtctcttcctacagagggaagcaaagaaataagaagacctagcattgctcctgttttagaggttgcagatacatcatcgattcaaacatgtgatcttctaagtgaccaatcagaagatgaaactacaccagatgaagaaatgtcttcaaacttagagtatgctaaaggttacccaccttattctccatatataggaagttcacccactttttgtcatctccttcatgaaaaagtaccattttgctgcttaagattagacaagagttgccaacataactactatgaggatgcaaaagcctatggattcaaaaataaactaattatagttgcagctgaaacagctggaaatggattatataactttattgttcctctcagggcatattatagaccaaagaaagaacttaatcccatagtactgctattggataaccccctagatgacttactcaggtgtggagtgacttttgctgctaatatggtggttgtggataaagagagcaccatgagtgccgaggaagactacatggcagatgccaaaaccattgtgaacgtgcagacactcttcaggttgttttccagtctcagtattatcacagagctaactcaccccgccaacatgagattcatgcaattcagagccaaagactgttactctcttgctctttcaaaactggaaaagaaagaacgggagagaggctctaacttggcctttatgtttcgactgccttttgctgctgggagggtgtttagcatcagtatgttggacactctgctgtatcagtcatttgtgaaggattatatgatttctatcacgagacttctgttgggactggacactacaccaggatctgggtttctttgttctatgaaaatcactgcagatgacttatggatcagaacttatgccagactttatcagaagttgtgttcttctactggagatgttcccattggaatctacaggactgagtctcagaaacttactacatctgagtctcgaaaaatagcatcacaatctcaaatatctatcagtgtagaagagtgggaagacaccaaagactccaaagaacaagggcaccaccgcagcaaccaccgcaactcaacatccagtgaccagtcggaccatcccttgctgcggagaaaaagcatgcagtgggcccgaagactgagcagaaaaggcccaaaacactctggtaaaacagctgaaaaaataacccagcagcgactgaacctctacaggaggtcagaaagacaagagcttgctgaacttgtgaaaaatagaatgaaacacttgggtctttctacagtgggatatgatgaaatgaatgatcatcaaagtaccctctcctacatcctgattaacccatctccagataccagaatagagctgaatgatgttgtatacttaattcgaccagatccactggcctaccttccaaacagtgagcccagtcgaagaaacagcatctgcaatgtcactggtcaagattctcgggaggaaactcaactttgataaaaataaaatgagaaacttttttcctacaaagaccttgcttgaaaccacaaaagttttgctggcacgaaagaaactagatggaaatatatgtaattctctcatatttaaaaacgtaatctcttctcttagaagtatagatcattttgaaacttaatgtactacttactggtactctccctattaatatttgaaggacctcaatggaataaatttgaaaagctaaattaaaatacaaaaatttaaatctgacatttaattgttttataataatccaaactctatgaaagcaattttaaaaattattaaggttttatgaagttgacaaaatctaactatatttggtgcatcacaatggacacagaatgctgctgctcctcttaaaaattaaatgtgtcatattatattctttaaacttactgttttacaaaattgagctcatcgtaaatgtctagtcttctcacatagagattaaccaacaaacttgtgtggctgacttttgtgtaagaatcatagtttgctttagaatacaaatctttaagtcattttaacttttttttctgccttacgatataaaaatatttatcttagaatttgagatgttcatagcatgttttattacattgaagaaactaaaacataaatgaaaagaaacactaggttcctgcactttttggtaactttatgtctagcaaatattttatgccaagaaaagcatactataaagcaaatatctattattctcctaaacgaatgcctagcatagagaaaatacttaatacacatttgttgacttaaatttaattcaaggattgaaaaattaactggatatcttgaaatatacagtaatgattgtccttagactcttgaactttaccatctttcctattcatatatctatatagtaaatttcactagaaaaattcttttaaaattgacagaagataatttataccttttatggactctgaagacacttcaaaacattaaaagtccttatgtctttggtaatgaaacatacactcaatgangatgtattaaattttgactt

SEQ ID NO: 53 - protein, 1118 aa, Homo sapiens
MVDLESEVPPLPPRYRFRDLLLGDQGWQNDDRVQVEFYMNENTFKERLKLFFIKNQRSSLRIRLFNFSLKLLSCLLYIIRVLLENPSQGNEWSHIFWVNRSLPLWGLQVSVALISLFETILLGYLSYKGNIWEQILRIPFILEIINAVPFIISIFWPSLRNLFVPVFLNCWLAKHALENMINDLHRAIQRTQSAMFNQVLILISTLLCLIFTCICGIQHLERIGKRLNLFDSLYFCIVTFSTVGFGDVTPETWSSKLFVVAMICVALVVLPIQFEQLAYLWMERQKSGGNYSRHRAQTEKHVVLCVSSLKIDLLMDFLNEFYAHPRLQDYYVVILCPTEMDVQVRRVLQIPMWSQRVIYLQGSALKDQDLLRAKMDDAEACFILSSRCEVDRTSSDHQTILRAWAVKDFAPNCPLYVQILKPENKFHIKFADHVVCEEEFKYAMLALNCICPATSTLITLLVHTSRGQEGQQSPEQWQKMYGRCSGNEVYHIVLEESTFFAEYEGKSFTYASFHAHKKFGVCLIGVRREDNKNILLNPGPRYIMNSTDICFYINITKEENSAFKNQDQQRKSNVSRSFYHGPSRLPVHSIIASMGTVAIDLQDTSCRSASGPTLSLPTEGSKEIRRPSIAPVLEVADTSSIQTCDLLSDQSEDETTPDEEMSSNLEYAKGYPPYSPYIGSSPTFCHLLHEKVPFCCLRLDKSCQHNYYEDAKAYGFKNKLIIVAAETAGNGLYNFIVPLRAYYRPKKELNPIVLLLDNPLDDLLRCGVTFAANMVVVDKESTMSAEEDYMADAKTIVNVQTLFRLFSSLSIITELTHPANMRFMQFRAKDCYSLALSKLEKKERERGSNLAFMFRLPFAAGRVFSISMLDTLLYQSFVKDYMISITRLLLGLDTTPGSGFLCSMKITADDLWIRTYARLYQKLCSSTGDVPIGIYRTESQKLTTSESRKIASQSQISISVEEWEDTKDSKEQGHHRSNHRNSTSSDQSDHPLLRRKSMQWARRLSRKGPKHSGKTAEKITQQRLNLYRRSERQELAELVKNRMKHLGLSTVGYDEMNDHQSTLSYILINPSPDTRIELNDVVYLIRPDPLAYLPNSEPSRRNSICNVTGQDSREETQL

SEQ ID NO: 54 - DNA, 3357 bp, Homo sapiens
  CDS (1)...(3357)
atggttgatttggagagcgaagtgccccctctgcctcccaggtacaggtttcgagatttgctgctaggggaccaaggatggcaaaacgatgacagagtacaagttgaattctatatgaatgaaaatacatttaaagaaagactaaaattatttttcataaaaaaccagagatcaagtctaaggatacgcctgttcaatttttctctcaaattactaagctgcttattatacataatccgagtactactagaaaacccttcacaaggaaatgaatggtctcatatcttttgggtgaacagaagtctacctttgtggggcttacaggtttcagtggcattgataagtctgtttgaaacaatattacttggttatcttagttataagggaaacatctgggaacagattttacgaatacccttcatcttggaaataattaatgcagttcccttcattatctcaatattctggccttccttaaggaatctatttgtcccagtctttctgaactgttggcttgccaaacatgccttggaaaatatgattaatgatctacacagagccattcagcgtacacagtctgcaatgtttaatcaagttttgattttaatatctacattactatgccttatcttcacctgcatttgtgggatccaacatctggaacgaataggaaagaggctgaatctctttgactccctttatttctgcattgtgacgttttctactgtgggcttcggggatgtcactcctgaaacatggtcctccaagctttttgtagttgctatgatttgtgttgctcttgtggttctacccatacagtttgaacagctggcttatttgtggatggagagacaaaagtcaggaggaaactatagtcgacatagagctcaaactgaaaagcatgtcgtcctgtgtgtcagctcactgaagattgatttacttatggattttttaaatgaattctatgctcatcctaggctccaggattattatgtggtgattttgtgtcctactgaaatggatgtacaggttcgaagggtactgcagattccaatgtggtcccaacgagttatctaccttcaaggttcagcccttaaagatcaagacctattgagagcaaagatggatgacgctgaggcctgttttattctcagtagccgttgtgaagtggataggacatcatctgatcaccaaacaattttgagagcatgggctgtgaaagattttgctccaaattgtcctttgtatgtccagatattaaagcctgaaaataaatttcacatcaaatttgctgatcatgttgtttgtgaagaagagtttaaatacgccatgttagctttaaactgtatatgcccagcaacatctacacttattacactactggttcatacctctagagggcaagaaggccagcaatcgccagaacaatggcagaagatgtacggtagatgctccgggaatgaagtctaccacattgttttggaagaaagtacattttttgctgaatatgaaggaaagagttttacatatgcctctttccatgcacacaaaaagtttggcgtctgcttgattggtgttaggagggaggataataaaaacattttgctgaatccaggtcctcgatacattatgaattctacggacatatgcttttatattaatattaccaaagaagagaattcagcatttaaaaaccaagaccagcagagaaaaagcaatgtgtccaggtcgttttatcatggaccttccagattacctgtacatagcataattgccagcatgggtactgtggctatagacctgcaagatacaagctgtagatcagcaagtggccctaccctgtctcttcctacagagggaagcaaagaaataagaagacctagcattgctcctgttttagaggttgcagatacatcatcgattcaaacatgtgatcttctaagtgaccaatcagaagatgaaactacaccagatgaagaaatgtcttcaaacttagagtatgctaaaggttacccaccttattctccatatataggaagttcacccactttttgtcatctccttcatgaaaaagtaccattttgctgcttaagattagacaagagttgccaacataactactatgaggatgcaaaagcctatggattcaaaaataaactaattatagttgcagctgaaacagctggaaatggattatataactttattgttcctctcagggcatattatagaccaaagaaagaacttaatcccatagtactgctattggataaccccctagatgacttactcaggtgtggagtgacttttgctgctaatatggtggttgtggataaagagagcaccatgagtgccgaggaagactacatggcagatgccaaaaccattgtgaacgtgcagacactcttcaggttgttttccagtctcagtattatcacagagctaactcaccccgccaacatgagattcatgcaattcagagccaaagactgttactctcttgctctttcaaaactggaaaagaaagaacgggagagaggctctaacttggcctttatgtttcgactgccttttgctgctgggagggtgtttagcatcagtatgttggacactctgctgtatcagtcatttgtgaaggattatatgatttctatcacgagacttctgttgggactggacactacaccaggatctgggtttctttgttctatgaaaatcactgcagatgacttatggatcagaacttatgccagactttatcagaagttgtgttcttctactggagatgttcccattggaatctacaggactgagtctcagaaacttactacatctgagtctcgaaaaatagcatcacaatctcaaatatctatcagtgtagaagagtgggaagacaccaaagactccaaagaacaagggcaccaccgcagcaaccaccgcaactcaacatccagtgaccagtcggaccatcccttgctgcggagaaaaagcatgcagtgggcccgaagactgagcagaaaaggcccaaaacactctggtaaaacagctgaaaaaataacccagcagcgactgaacctctacaggaggtcagaaagacaagagcttgctgaacttgtgaaaaatagaatgaaacacttgggtctttctacagtgggatatgatgaaatgaatgatcatcaaagtaccctctcctacatcctgattaacccatctccagataccagaatagagctgaatgatgttgtatacttaattcgaccagatccactggcctaccttccaaacagtgagcccagtcgaagaaacagcatctgcaatgtcactggtcaagattctcgggaggaaactcaactttga

SEQ ID NO: 55 - DNA, 2847 bp, Homo sapiens
  CDS (561)...(2477)
ccacgcgtccggccctgtgcttcggatggcggcgggaggttgatggcgagtggtgctgaagggacagctccagcagtggctgatttgggggagaaacaaaatctgcagatggaatccgagcagggcgacttcaccttcaagtggtgagctctcctgacctgcggccagtctccactccattcacggccagccgatctgcccgctcccggaggggtcgggcagtgccggctggacccgccccgagctccatggtttgcccaaccctgcgcgatggtgactctgggcgcggaggttggcgactggcaaatccgcagatcacagaatgaaggcggggagcgcggccggcggccggcgggggctttctcccccaccccagcgcccagggaagcggctcaaccacctgaatccggaaaacgccaacaagtagtttctcgtcggagaagggcggctcacctgggcgccaagactcagtcccgctgcccagagaacctcgtccactcggaaaccaaagcagaaccacttttctctcggtctcgttaagtcatgtctgagtcacagagatgggcaagatcgagaacaacgagagggtgatcctcaatgtcgggggcacccggcacgaaacctaccgcagcaccctcaagaccctgcctggaacacgcctggcccttcttgcctcctccgagcccccaggcgactgcttgaccacggcgggcgacaagctgcagccgtcgccgcctccactgtcgccgccgccgagagcgcccccgctgtcccccgggccaggcggctgcttcgagggcggcgcgggcaactgcagttcccgcggcggcagggccagcgaccatcccggtggcggccgcgagttcttcttcgaccggcacccgggcgtcttcgcctatgtgctcaattactaccgcaccggcaagctgcactgccccgcagacgtgtgcgggccgctcttcgaggaggagctggccttctggggcatcgacgagaccgacgtggagccctgctgctggatgacctaccggcagcaccgcgacgccgaggaggcgctggacatcttcgagacccccgacctcattggcggcgaccccggcgacgacgaggacctggcggccaagaggctgggcatcgaggacgcggcggggctcgggggccccgacggcaaatctggccgctggaggaggctgcagccccgcatgtgggccctcttcgaagacccctactcgtccagagccgccaggtttattgcttttgcttctttattcttcatcctggtttcaattacaactttttgcctggaaacacatgaagctttcaatattgttaaaaacaagacagaaccagtcatcaatggcacaagtgttgttctacagtatgaaattgaaacggatcctgccttgacgtatgtagaaggagtgtgtgtggtgtggtttacttttgaatttttagtccgtattgttttttcacccaataaacttgaattcatcaaaaatctcttgaatatcattgactttgtggccatcctacctttctacttagaggtgggactcagtgggctgtcatccaaagctgctaaagatgtgcttggcttcctcagggtggtaaggtttgtgaggatcctgagaattttcaagctcacccgccattttgtaggtctgagggtgcttggacatactcttcgagctagtactaatgaatttttgctgctgataattttcctggctctaggagttttgatatttgctaccatgatctactatgccgagagagtgggagctcaacctaacgacccttcagctagtgagcacacacagttcaaaaacattcccattgggttctggtgggctgtagtgaccatgactaccctgggttatggggatatgtacccccaaacatggtcaggcatgctggtgggagccctgtgtgctctggctggagtgctgacaatagccatgccagtgcctgtcattgtcaataattttggaatgtactactccttggcaatggcaaagcagaaacttccaaggaaaagaaagaagcacatccctcctgctcctcaggcaagctcacctactttttgcaagacagaattaaatatggcctgcaatagtacacagagtgacacatgtctgggcaaagacaatcgacttctggaacataacagatcagtgttatcaggtgacgacagtacaggaagtgagccgccactatcacccccagaaaggctccccatcagacgctctagtaccagagacaaaaacagaagaggggaaacatgtttcctactgacgacaggtgattacacgtgtgcttctgatggagggatcaggaaaggatatgaaaaatcccgaagcttaaacaacatagcgggcttggcaggcaatgctctgaggctctctccagtaacatcaccctacaactctccttgtcctctgaggcgctctcgatctcccatcccatctatcttgtaaaccaaacaaccaaactgcatcagtcggctaaattgtattaattcaagygctgtttaccccataatggaaataattaaatgtagagttactccaggctccattaatacagtataaatcttgcgtgatactacaatttgaagtcagaaatgccacttgggtagctaatgaatcttacccaggctttaaagattgtctaaagtagtgctaagatccctcctattaattgccctgatatccttttgcaataaaatgacagatagtgtcagatattgaccagtgcactaatatataaacataccctcagggagatatatttaaaacagtgtgcttccaaatgccaaccacttcattggaactttatttcttgtga

SEQ ID NO: 56 - protein, 638 aa, Homo sapiens
MGKIENNERVILNVGGTRHETYRSTLKTLPGTRLALLASSEPPGDCLTTAGDKLQPSPPPLSPPPRAPPLSPGPGGCFEGGAGNCSSRGGRASDHPGGGREFFFDRHPGVFAYVLNYYRTGKLHCPADVCGPLFEEELAFWGIDETDVEPCCWMTYRQHRDAEEALDIFETPDLIGGDPGDDEDLAAKRLGIEDAAGLGGPDGKSGRWRRLQPRMWALFEDPYSSRAARFIAFASLFFILVSITTFCLETHEAFNIVKNKTEPVINGTSVVLQYEIETDPALTYVEGVCVVWFTFEFLVRIVFSPNKLEFIKNLLNIIDFVAILPFYLEVGLSGLSSKAAKDVLGFLRVVRFVRILRIFKLTRHFVGLRVLGHTLRASTNEFLLLIIFLALGVLIFATMIYYAERVGAQPNDPSASEHTQFKNIPIGFWWAVVTMTTLGYGDMYPQTWSGMLVGALCALAGVLTIAMPVPVIVNNFGMYYSLAMAKQKLPRKRKKHIPPAPQASSPTFCKTELNMACNSTQSDTCLGKDNRLLEHNRSVLSGDDSTGSEPPLSPPERLPIRRSSTRDKNRRGETCFLLTTGDYTCASDGGIRKGYEKSRSLNNIAGLAGNALRLSPVTSPYNSPCPLRRSRSPIPSIL

SEQ ID NO: 57 - DNA, 1917 bp, Homo sapiens
  CDS (1)...(1917)
atgggcaagatcgagaacaacgagagggtgatcctcaatgtcgggggcacccggcacgaaacctaccgcagcaccctcaagaccctgcctggaacacgcctggcccttcttgcctcctccgagcccccaggcgactgcttgaccacggcgggcgacaagctgcagccgtcgccgcctccactgtcgccgccgccgagagcgcccccgctgtcccccgggccaggcggctgcttcgagggcggcgcgggcaactgcagttcccgcggcggcagggccagcgaccatcccggtggcggccgcgagttcttcttcgaccggcacccgggcgtcttcgcctatgtgctcaattactaccgcaccggcaagctgcactgccccgcagacgtgtgcgggccgctcttcgaggaggagctggccttctggggcatcgacgagaccgacgtggagccctgctgctggatgacctaccggcagcaccgcgacgccgaggaggcgctggacatcttcgagacccccgacctcattggcggcgaccccggcgacgacgaggacctggcggccaagaggctgggcatcgaggacgcggcggggctcgggggccccgacggcaaatctggccgctggaggaggctgcagccccgcatgtgggccctcttcgaagacccctactcgtccagagccgccaggtttattgcttttgcttctttattcttcatcctggtttcaattacaactttttgcctggaaacacatgaagctttcaatattgttaaaaacaagacagaaccagtcatcaatggcacaagtgttgttctacagtatgaaattgaaacggatcctgccttgacgtatgtagaaggagtgtgtgtggtgtggtttacttttgaatttttagtccgtattgttttttcacccaataaacttgaattcatcaaaaatctcttgaatatcattgactttgtggccatcctacctttctacttagaggtgggactcagtgggctgtcatccaaagctgctaaagatgtgcttggcttcctcagggtggtaaggtttgtgaggatcctgagaattttcaagctcacccgccattttgtaggtctgagggtgcttggacatactcttcgagctagtactaatgaatttttgctgctgataattttcctggctctaggagttttgatatttgctaccatgatctactatgccgagagagtgggagctcaacctaacgacccttcagctagtgagcacacacagttcaaaaacattcccattgggttctggtgggctgtagtgaccatgactaccctgggttatggggatatgtacccccaaacatggtcaggcatgctggtgggagccctgtgtgctctggctggagtgctgacaatagccatgccagtgcctgtcattgtcaataattttggaatgtactactccttggcaatggcaaagcagaaacttccaaggaaaagaaagaagcacatccctcctgctcctcaggcaagctcacctactttttgcaagacagaattaaatatggcctgcaatagtacacagagtgacacatgtctgggcaaagacaatcgacttctggaacataacagatcagtgttatcaggtgacgacagtacaggaagtgagccgccactatcacccccagaaaggctccccatcagacgctctagtaccagagacaaaaacagaagaggggaaacatgtttcctactgacgacaggtgattacacgtgtgcttctgatggagggatcaggaaaggatatgaaaaatcccgaagcttaaacaacatagcgggcttggcaggcaatgctctgaggctctctccagtaacatcaccctacaactctccttgtcctctgaggcgctctcgatctcccatcccatctatcttgtaa

SEQ ID NO: 58 - DNA, 6582 bp, Homo sapiens
  CDS (524)...(3913)
ccacgcgtccgcccacgcgtccgcccacgcgtccgagaaggcttaggtgggcaggcaggacgagagaaagactgagaggagggaaagccgcgtaggtgggagtacagcggcgcgagggtcgagggggaaccctcgtcggtgcagatgaggagggtgggctttcagaactagtcccccctcgcaccccgccccgcccctcccgcgctggggtcttcacggtgccctgcctcagagcccggctccaccacgcccggaagagggagtctggccgtcggctggctcagggcgggccggttggctgtacccaggctccctggcccgagtgcgggaccagagcgcggggcggcgcggcagccgcgggccgaggaggggctgcgagcgaaacggcgcggcgcggcacggcggacgagttagggccggggcgagggaggctgtggctcccgacagagacaggggagtagtgtcgggctgaggcgagacagcccggtagagcccagctcagcgcccggcagccttcgacgcgatgttccgccggagcttgaatcgtttttgtgctggagaagagaaacgagttggcacacgcacagtgtttgttggcaatcatccagtttcggaaacagaagcttacattgcacaaagattttgtgataatagaatagtctcatctaagtatacactttggaattttctcccaaagaatctgtttgaacagtttagaagaattgcaaatttttattttctcataatcttccttgtacaggtcacagtagacacaccaactagcccagttaccagtggacttccacttttctttgttataactgttacagccatcaagcagggatatgaggattggctgagacacagagctgacaatgaagtcaacaaaagcactgtttacattattgaaaatgcaaagcgagtgagaaaagaaagtgaaaaaatcaaggttggtgatgtagtagaagtacaggcagatgaaacctttccctgtgatcttattcttctatcatcttgcaccactgatggaacctgttatgtcactacagccagtcttgatggggaatccaattgcaagacacattatgcagtacgtgataccattgcactgtgtacagcagaatccatcgataccctccgagcagcaattgaatgtgaacagcctcaacctgacctctacaaatttgttgggcgaatcaatatctacagtaatagtcttgaggctgttgccaggtctttgggacctgaaaatctcttgctgaaaggagctacgctaaaaaataccgagaagatatatggagttgctgtttacactggaatggaaaccaaaatggctttgaactaccaagggaaatctcagaaacgttctgctgttgaaaaatctattaatgctttcctgattgtatatttatttatcttactgaccaaagctgcagtatgcactactctaaagtatgtttggcaaagtaccccatacaatgatgaaccttggtataaccaaaagactcagaaagagcgagagaccttgaaggttttaaaaatgttcaccgacttcctatcatttatggttctattcaactttatcattcctgtctccatgtacgtcacagtagaaatgcagaaattcttgggctccttcttcatctcatgggataaggacttttatgatgaagaaattaatgaaggagccctggttaacacatcagaccttaatgaagaacttggtcaggtggattatgtatttacagataagactggaacactcactgaaaacagcatggaattcattgaatgctgcatagatggccacaaatataaaggtgtaactcaagaggttgatggattatctcaaactgatggaactttaacatattttgacaaagtagataagaatcgagaagagctgtttctacgtgccttgtgtttatgtcatactgtagaaatcaaaacaaacgatgctgttgatggagctacagaatcagctgaattaacctatatctcctcttcaccagatgaaatagctttggtgaaaggagctaaaaggtacgggttcacatttttaggaaatcgaaatggatatatgagagtagagaaccaaagaaaagaaatagaagaatatgaacttcttcacaccttaaactttgatgctgtccggcgacgtatgagtgtaattgtgaagactcaagaaggagacatacttctcttttgtaaaggagcagactcggcagtttttcccagagtgcaaaatcatgaaattgagttaactaaagtccatgtggaacgtaatgcaatggatgggtatcggacactctgtgtagccttcaaagaaattgctccagatgattatgaaagaattaacagacagctcatagaggcaaaaatggccttacaagacagagaagaaaaaatggaaaaagttttcgatgatattgagacaaacatgaatttaattggagccactgcagttgaagacaagctacaagatcaagctgcagagaccattgaagctctgcatgcagcaggcctgaaagtctgggtgctcactggggacaagatggagacagctaaatccacatgctatgcctgccgccttttccagaccaacactgagctcttagaactaaccacaaaaaccattgaagaaagtgaaaggaaagaagatcgattacatgaattattgatagaatatcgcaagaaattgctgcatgagtttcctaaaagtactagaagctttaaaaaagcatggacagaacatcaggaatatggattaatcatagatggctccacattgtcactcatactaaattctagtcaagactctagttcaaacaattacaaaagcattttcctacaaatatgtatgaagtgtactgcagtgctctgctgtcggatggcaccattacagaaagcccagattgtcagaatggtgaagaatttaaaaggcagcccaataactctgtcgataggtgatggtgccaatgatgttagtatgatcttggaatcccatgtgggaataggtattaaaggcaaagaaggtcgccaagcagctaggaatagcgattattctgttccaaagtttaaacacttaaagaaactgctgttggctcatggacatctatattatgtgagaatagcacaccttgtacagtacttcttctataagaacctttgtttcattttgccacagtttttgtaccagttcttctgtggattctcacaacagccactgtatgatgctgcttaccttacaatgtacaatatctgcttcacatccttgcccatcctggcctatagtctactggaacagcacatcaacattgacactctgacctcagatccccgattgtatatgaaaatttctggcaatgccatgctacagttgggccccttcttatattggacatttctggctgcctttgaagggacagtgttcttctttgggacttactttctttttcagactgcatccctagaagaaaatggaaaggtatacggaaactggacttttggaaccattgtttttacagtcttagtattcactgtaaccctgaagcttgccttggatacccgattctggacgtggataaatcactttgtgatttggggttctttagccttctatgtatttttctcattcttctggggaggaattatttggccttttctcaagcaacagagaatgtattttgtatttgcccaaatgctgtcttctgtatccacatggttggctataattcttctaatatttatcagcctgttccctgagattcttctgatagtattaaagaatgtaagaagaagaagtgccaggagaaatctgagctgtagaagggcatctgactcattatccgccagaccttcagtcagacctcttcttttacgaacattctcagacgaatctaatgtattgtaacagaatccgaatcttgaactgcctatgttattgtcctacaagcatactgacagtggttacagctaaaaaagaaagcatgaagaaacaactacaaaaagttatcatctcaggatacttgatatgcaacacactaaaccactctcatgtctagagttcacaataaatgttcattaaaataccaaatgattctcttaagcatttaccattattgtaagtagcctttatggccaaagctgtaagttaagaattatatgaaagttgaaagcaagaatacttagaattctggctttagttagagtaatataactcaaatgggtgctcttttaacccatgaactttgtgaatggatttaaatacaatagtatgaagtagaagttatgcaatgagaatgaatagattttgctaatactactttttttgcctggcagaagaaatagactatttggatcacatttctcattcctcctaaatgatcatcttaattttttttcccaagtacataaggaatacttgaaaatacagaataactaaatagtatcaatgcatcagacagaatagttaatcccttctgtttacccatgtgctactaatgtcttggtagaatattcttgccaaaaaaataccttgaacgcttatgtggaaagtgttaacttacgggtatttttgtgggaatagaaaaaaattgtttattttttattcttctgaattaaaccccacttatgggtgtaagcctactagacttgaaaataaagtataaaacatttccaatcacttagtagcccctcaaagtagttagaaaataaacagatttttccagtgttgattttactgggatctgcagtaaggtggtttaaaccatagttatataaaaataaaggtcattctgaatatcagccttttataattttatgtgaagaggaagaaatatagcttattttaaacttttgacggtttttatttgaaagagattgcatttatgcatatatgcagtgctttttcttaaacttggccaatttggaaagggggaaggagccaccccaaaacggtggttcagcttgtagagccatgactctgtgaagatgaatgttgtctcttaacttggacagggaaatggtctaactctaaaccatgtaactgaccttagtaaagtccttgactaactgaactagaaggaaggtttagccttctaattagttcacttgaaacataaatgtgaaatgtcttcattcaatgttaaacacatacttttttggatataaatgaccatatttatttgactgctagtttttttgttttttttttgtctttctggcatgcctgtactattattaatgtttatattgtaccttgatttggaaaagtattggagttaatctgtattatatttatatagtccatatggcacatttgattcttccacatatattttgtgttaatgtttaggtatgatttttttctaaattctagaaaagaacataatttcagttatcagaagccattccatcattatagaccctttttcattatttcatttgctctcatatatcagtattatttttgagcattttgttacatgtcattcacaacttacctaagtgtgctgtgttctggtagcccgtatttgaggtaagctgctgaaaacaaaagtctctatattctttgcctattccaaagagctaaaaaagtctaacccaggaaagcttttgatattttgtgtttgttttcttgttcttatggttgttgttgctgtattatgattgctgttttacataaaatctatgggaactgtgaatacagacaagagagccacagtagagaggcttgtttaatgcagtaccattggagagttaacagaataatctagtagaaaaataactggttgcatgtaaaattccttccagccagaaagaaagaaagacaaggagtaagggggatttagagttatgtctcagctacacattacattgtgatactgcagctcaaattcagaatggcaatgatacatgatatcatggcctagatccttgagagggacctggctttcctttttaaaagatattttactgaagagctaaaaactggccagtgtggggttagcagatcgaataacttgaaatagaccgtgcagtattcctagcactcaatgtaatcaccctatttgtgacagagaaagggaaaaaaatataataagatcatctacctataatttgaataattttgagctatcaaaatgtctttgtaattttcacaaccgctgtccattgtttgaggatgttacctactaaactgaaaacattcattccatatctacttacacatacaccagcaacagtataaatgtaagcctaactttgcaaaattcgtaataatttagtgatggaattttttaataacatgcagtatataaatgtgcagattttatgcgtgttgacaaaatcatttttcagcttgcaaaatgggactgcaatattacatttttcacttaagcagttttttacatctacgttgttgctttctaaaatgaatgtgaatgccatcttttatgactgcaacttgccttttccattacagaaatttttgtttgatgtaatcaataaactttggtatgataaaaaaaaaaaaaaaaaaaaaaaaaaaaaaaaaaaaaaaaaaaaaaaaaaaaaaaaaaa

SEQ ID NO: 59 - protein, 1129 aa, Homo sapiens
MFRRSLNRFCAGEEKRVGTRTVFVGNHPVSETEAYIAQRFCDNRIVSSKYTLWNFLPKNLFEQFRRIANFYFLIIFLVQVTVDTPTSPVTSGLPLFFVITVTAIKQGYEDWLRHRADNEVNKSTVYIIENAKRVRKESEKIKVGDVVEVQADETFPCDLILLSSCTTDGTCYVTTASLDGESNCKTHYAVRDTIALCTAESIDTLRAAIECEQPQPDLYKFVGRINIYSNSLEAVARSLGPENLLLKGATLKNTEKIYGVAVYTGMETKMALNYQGKSQKRSAVEKSINAFLIVYLFILLTKAAVCTTLKYVWQSTPYNDEPWYNQKTQKERETLKVLKMFTDFLSFMVLFNFIIPVSMYVTVEMQKFLGSFFISWDKDFYDEEINEGALVNTSDLNEELGQVDYVFTDKTGTLTENSMEFIECCIDGHKYKGVTQEVDGLSQTDGTLTYFDKVDKNREELFLRALCLCHTVEIKTNDAVDGATESAELTYISSSPDEIALVKGAKRYGFTFLGNRNGYMRVENQRKEIEEYELLHTLNFDAVRRRMSVIVKTQEGDILLFCKGADSAVFPRVQNHEIELTKVHVERNAMDGYRTLCVAFKEIAPDDYERINRQLIEAKMALQDREEKMEKVFDDIETNMNLIGATAVEDKLQDQAAETIEALHAAGLKVWVLTGDKMETAKSTCYACRLFQTNTELLELTTKTIEESERKEDRLHELLIEYRKKLLHEFPKSTRSFKKAWTEHQEYGLIIDGSTLSLILNSSQDSSSNNYKSIFLQICMKCTAVLCCRMAPLQKAQIVRMVKNLKGSPITLSIGDGANDVSMILESHVGIGIKGKEGRQAARNSDYSVPKFKHLKKLLLAHGHLYYVRIAHLVQYFFYKNLCFILPQFLYQFFCGFSQQPLYDAAYLTMYNICFTSLPILAYSLLEQHINIDTLTSDPRLYMKISGNAMLQLGPFLYWTFLAAFEGTVFFFGTYFLFQTASLEENGKVYGNWTFGTIVFTVLVFTVTLKLALDTRFWTWINHFVIWGSLAFYVFFSFFWGGIIWPFLKQQRMYFVFAQMLSSVSTWLAIILLIFISLFPEILLIVLKNVRRRSARRNLSCRRASDSLSARPSVRPLLLRTFSDESNVL

SEQ ID NO: 60 - DNA, 3390 bp, Homo sapiens
  CDS (1)...(3390)
atgttccgccggagcttgaatcgtttttgtgctggagaagagaaacgagttggcacacgcacagtgtttgttggcaatcatccagtttcggaaacagaagcttacattgcacaaagattttgtgataatagaatagtctcatctaagtatacactttggaattttctcccaaagaatctgtttgaacagtttagaagaattgcaaatttttattttctcataatcttccttgtacaggtcacagtagacacaccaactagcccagttaccagtggacttccacttttctttgttataactgttacagccatcaagcagggatatgaggattggctgagacacagagctgacaatgaagtcaacaaaagcactgtttacattattgaaaatgcaaagcgagtgagaaaagaaagtgaaaaaatcaaggttggtgatgtagtagaagtacaggcagatgaaacctttccctgtgatcttattcttctatcatcttgcaccactgatggaacctgttatgtcactacagccagtcttgatggggaatccaattgcaagacacattatgcagtacgtgataccattgcactgtgtacagcagaatccatcgataccctccgagcagcaattgaatgtgaacagcctcaacctgacctctacaaatttgttgggcgaatcaatatctacagtaatagtcttgaggctgttgccaggtctttgggacctgaaaatctcttgctgaaaggagctacgctaaaaaataccgagaagatatatggagttgctgtttacactggaatggaaaccaaaatggctttgaactaccaagggaaatctcagaaacgttctgctgttgaaaaatctattaatgctttcctgattgtatatttatttatcttactgaccaaagctgcagtatgcactactctaaagtatgtttggcaaagtaccccatacaatgatgaaccttggtataaccaaaagactcagaaagagcgagagaccttgaaggttttaaaaatgttcaccgacttcctatcatttatggttctattcaactttatcattcctgtctccatgtacgtcacagtagaaatgcagaaattcttgggctccttcttcatctcatgggataaggacttttatgatgaagaaattaatgaaggagccctggttaacacatcagaccttaatgaagaacttggtcaggtggattatgtatttacagataagactggaacactcactgaaaacagcatggaattcattgaatgctgcatagatggccacaaatataaaggtgtaactcaagaggttgatggattatctcaaactgatggaactttaacatattttgacaaagtagataagaatcgagaagagctgtttctacgtgccttgtgtttatgtcatactgtagaaatcaaaacaaacgatgctgttgatggagctacagaatcagctgaattaacctatatctcctcttcaccagatgaaatagctttggtgaaaggagctaaaaggtacgggttcacatttttaggaaatcgaaatggatatatgagagtagagaaccaaagaaaagaaatagaagaatatgaacttcttcacaccttaaactttgatgctgtccggcgacgtatgagtgtaattgtgaagactcaagaaggagacatacttctcttttgtaaaggagcagactcggcagtttttcccagagtgcaaaatcatgaaattgagttaactaaagtccatgtggaacgtaatgcaatggatgggtatcggacactctgtgtagccttcaaagaaattgctccagatgattatgaaagaattaacagacagctcatagaggcaaaaatggccttacaagacagagaagaaaaaatggaaaaagttttcgatgatattgagacaaacatgaatttaattggagccactgcagttgaagacaagctacaagatcaagctgcagagaccattgaagctctgcatgcagcaggcctgaaagtctgggtgctcactggggacaagatggagacagctaaatccacatgctatgcctgccgccttttccagaccaacactgagctcttagaactaaccacaaaaaccattgaagaaagtgaaaggaaagaagatcgattacatgaattattgatagaatatcgcaagaaattgctgcatgagtttcctaaaagtactagaagctttaaaaaagcatggacagaacatcaggaatatggattaatcatagatggctccacattgtcactcatactaaattctagtcaagactctagttcaaacaattacaaaagcattttcctacaaatatgtatgaagtgtactgcagtgctctgctgtcggatggcaccattacagaaagcccagattgtcagaatggtgaagaatttaaaaggcagcccaataactctgtcgataggtgatggtgccaatgatgttagtatgatcttggaatcccatgtgggaataggtattaaaggcaaagaaggtcgccaagcagctaggaatagcgattattctgttccaaagtttaaacacttaaagaaactgctgttggctcatggacatctatattatgtgagaatagcacaccttgtacagtacttcttctataagaacctttgtttcattttgccacagtttttgtaccagttcttctgtggattctcacaacagccactgtatgatgctgcttaccttacaatgtacaatatctgcttcacatccttgcccatcctggcctatagtctactggaacagcacatcaacattgacactctgacctcagatccccgattgtatatgaaaatttctggcaatgccatgctacagttgggccccttcttatattggacatttctggctgcctttgaagggacagtgttcttctttgggacttactttctttttcagactgcatccctagaagaaaatggaaaggtatacggaaactggacttttggaaccattgtttttacagtcttagtattcactgtaaccctgaagcttgccttggatacccgattctggacgtggataaatcactttgtgatttggggttctttagccttctatgtatttttctcattcttctggggaggaattatttggccttttctcaagcaacagagaatgtattttgtatttgcccaaatgctgtcttctgtatccacatggttggctataattcttctaatatttatcagcctgttccctgagattcttctgatagtattaaagaatgtaagaagaagaagtgccaggagaaatctgagctgtagaagggcatctgactcattatccgccagaccttcagtcagacctcttcttttacgaacattctcagacgaatctaatgtattgtaa

SEQ ID NO: 61 - DNA, 6073 bp, Homo sapiens
  CDS (273)...(4553)
ccacgcgtccgggaggagcggagggagaagtaggttgcgagctcagcacaggctccggcgctggctcccgcagctgagtttgggagatgtctaagtgatttttttttttcccggaaggcaaatggctggcgtggaagcacaacccgctttcactcttcgaatttgtgcttagctcttttcttgtaccttgcgactcgtgaccaacatgctgtgatgtgtgccgagggaggaattggtcagctacacaacctggatcttaccacagtttggatatgactgaggctctccaatgggccagatatcactggcgacggctgatcagaggtgcaaccagggatgatgattcagggccatacaactattcctcgttgctcgcctgtgggcgcaagtcctctcagatccctaaactgtcaggaaggcaccggattgttgttccccacatccagcccttcaaggatgagtatgagaagttctccggagcctatgtgaacaatcgaatacgaacaacaaagtacacacttctgaattttgtgccaagaaatttatttgaacaatttcacagagctgccagtttatatttcctgttcctagttgtcctgaactgggtacctttggtagaagccttccaaaaggaaatcaccatgttgcctctggtggtggtccttacaattatcgcaattaaagatggcctggaagattatcggaaatacaaaattgacaaacagatcaataatttaataactaaagtttatagtaggaaagagaaaaaatacattgaccgatgctggaaagacgttactgttggggactttattcgcctctcctgcaatgaggtcatccctgcagacatggtactactcttttccactgatccagatggaatctgtcacattgagacttctggtcttgatggagagagcaatttaaaacagaggcaggtggttcggggatatgcagaacaggactctgaagttgatcctgagaagttttccagtaggatagaatgtgaaagcccaaacaatgacctcagcagattccgaggcttcctagaacattccaacaaagaacgcgtgggtctcagtaaagaaaatttgttgcttagaggatgcaccattagaaacacagaggctgttgtgggcattgtggtttatgcaggccatgaaaccaaagcaatgctgaacaacagtgggccacggtataagcgcagcaaattagaaagaagagcaaacacagatgtcctctggtgtgtcatgcttctggtcataatgtgcttaactggcgcagtaggtcatggaatctggctgagcaggtatgaaaagatgcattttttcaatgttcccgagcctgatggacatatcatatcaccactgttggcaggattttatatgttttggaccatgatcattttgttacaggtcttgattcctatttctctctatgtttccatcgaaattgtgaagcttggacaaatatatttcattcaaagtgatgtggatttctacaatgaaaaaatggattctattgttcagtgccgagccctgaacatcgccgaggatctgggacagattcagtacctcttttccgataagacaggaaccctcactgagaataagatggtttttcgaagatgtagtgtggcaggatttgattactgccatgaagaaaatgccaggaggttggagtcctatcaggaagctgtctctgaagatgaagattttatagacacagtcagtggttccctcagcaatatggcaaaaccgagagcccccagctgcaggacagttcataatgggcctttgggaaataagccctcaaatcatcttgctgggagctcttttactctaggaagtggagaaggagccagtgaagtgcctcattccagacaggctgctttcagtagccccattgaaacagacgtggtaccagacaccaggcttttagacaaatttagtcagattacacctcggctctttatgccactagatgagaccatccaaaatccaccaatggaaactttgtacattatcgactttttcattgcattggcaatttgcaacacagtagtggtttctgctcctaaccaaccccgacaaaagatcagacacccttcactgggggggttgcccattaagtctttggaagagattaaaagtcttttccagagatggtctgtccgaagatcaagttctccatcgcttaacagtgggaaagagccatcttctggagttccaaacgcctttgtgagcagactccctctctttagtcgaatgaaaccagcttcacctgtggaggaagaggtctcccaggtgtgtgagagcccccagtgctccagtagctcagcttgctgcacagaaacagagaaacaacacggtgatgcaggcctcctgaatggcaaggcagagtccctccctggacagccattggcctgcaacctgtgttatgaggccgagagcccagacgaagcggccttagtgtatgccgccagggcttaccaatgcactttacggtctcggacaccagagcaggtcatggtggactttgctgctttgggaccattaacatttcaactcctacacatcctgccctttgactcagtaagaaaaagaatgtctgttgtggtccgacaccctctttccaatcaagttgtggtgtatacgaaaggcgctgattctgtgatcatggagttactgtcggtggcttccccagatggagcaagtctggagaaacaacagatgatagtaagggagaaaacccagaagcacttggatgactatgccaaacaaggccttcgtactttatgtatagcaaagaaggtcatgagtgacactgaatatgcagagtggctgaggaatcattttttagctgaaaccagcattgacaacagggaagaattactacttgaatctgccatgaggttggagaacaaacttacattacttggtgctactggcattgaagaccgtctgcaggagggagtccctgaatctatagaagctcttcacaaagcgggcatcaagatctggatgctgacaggggacaagcaggagacagctgtcaacatagcttatgcatgcaaactactggagccagatgacaagctttttatcctcaatacccaaagtaaagatgcctgtgggatgctgatgagcacaattttgaaagaacttcagaagaaaactcaagccctgccagagcaagtgtcattaagtgaagatttacttcagcctcctgtcccccgggactcagggttacgagctggactcattatcactgggaagaccctggagtttgccctgcaagaaagtctgcaaaagcagttcctggaactgacatcttggtgtcaagctgtggtctgctgccgagccacaccgctgcagaaaagtgaagtggtgaaattggtccgcagccatctccaggtgatgacccttgctattggtgatggtgccaatgatgttagcatgatacaagtggcagacattgggataggggtctcaggtcaagaaggcatgcaggctgtgatggccagtgactttgccgtttctcagttcaaacatctcagcaagctccttcttgtccatggacactggtgttatacacggctttccaacatgattctctattttttctataagaatgtggcctatgtgaacctccttttctggtaccagttcttttgtggattttcaggaacatccatgactgattactgggttttgatcttcttcaacctcctcttcacatctgcccctcctgtcatttatggtgttttggagaaagatgtgtctgcagagaccctcatgcaactgcctgaactttacagaagtggtcagaaatcagaggcatacttaccccataccttctggatcaccttattggatgctttttatcaaagcctggtctgcttctttgtgccttattttacctaccagggctcagatactgacatctttgcatttggaaaccccctgaacacagccgctctgttcatcgttctcctccatctggtcattgaaagcaagagtttgacttggattcacttgctggtcatcattggtagcatcttgtcttattttttatttgccatagtttttggagccatgtgtgtaacttgcaacccaccatccaacccttactggattatgcaggagcacatgctggatccagtattctacttagtttgtatcctcacgacgtccattgctcttctgcccaggtttgtatacagagttcttcagggatccctgtttccatctccaattctgagagctaagcactttgacagactaactccagaggagaggactaaagctctcaagaagtggagaggggctggaaagatgaatcaagtgacatcaaagtatgctaaccaatcagctggcaagtcaggaagaagacccatgcctggcccttctgctgtatttgcaatgaagtcagcaacttcctgtgctattgagcaaggaaacttatctctgtgtgaaactgctttagatcaaggctactctgaaactaaggcctttgagatggctggaccctccaaaggtaaagaaagctagataccctccttggagttgcaagtattctttcaaggttggaagagggattttgaagaggtatctctccaagcaagaatgacttgtttttccataagggacatgagcattttactaggcttggaagagctgacatgatgagcattattgtatgtttgtatatacatttgtgatagagggctagagtttgacctagagagagtttaaggaagtgaaatatttaattcagaaccaaatgcttttgtaaaactttttggattttgtaaaagcattttcattctcttagaaattcaagtattttcaaggggagtcatttgagatatatttattttactaggagatcttatattctagggaaatgctttaaatggtcaggctccaatcggaatttttttaagaaaaaagtagtttttaatacattggttaggactcagaggaaatacggaaaaaacattgtagatggttaatttacagataaaatcccaagagccttttaaacaacaaggtacctaaaatagggtataattatactgcttaaaatacagttagtgcctattaatagctttttatttcctatgggaagatgcttttggtcttctggctgaagatgtaggcatacctctcactcatttcaatgttttcctgaggtggagccttcattggaaaggggaaagagggattctagggtttcatcagggaccaggaatgcattcctctgtcaggttccaatcaagagaagaccttttatgagatctgcctctgtatagatgttgtcagttaggaaactgaagccataggtcaggcagacatcagctcagcctgtggcccattgggtgatttcctgtattttaaaactgacagtagcctgatcaaagtgatacaatcaatttcaaaacaatcttccagagaccacttgaaggttcatagtttttacaataccctgagacttttcaggtgttggagcctctaaaatatgagatataaacagaaactaatacaagttgttctctggaggtttctatgaggttcttagaaaaatttggttttaaaatcatttgaggacaggaatgtctatagcaagtttactcctattgcgaatcatgtatgctggctttagttgtaacaaacgattttattctaagtaaggccaggtgctactataaaatcatatattcctgttgaagttcttttgaagtcctatctctatttattatatttgaaagttgtcagccaccagtcatccagaatttccttcctgaatctccatgctcatatgcaatgtctacatcaaggtcttcttaatgactattattctcagggtttagttttctaccttctgcctactattttggtctgacatttttgtagccttctgttattattggaaatagtctcttacataagctgatttcgagaactttcaaaatctcacatagctaatggaagttgctttctgctttcttatgactgtttttataaataaactgtttcataaataaaaaaaaaaaaaaaagggcggccgc

SEQ ID NO: 62 - protein, 1426 aa, Homo sapiens
MTEALQWARYHWRRLIRGATRDDDSGPYNYSSLLACGRKSSQIPKLSGRHRIVVPHIQPFKDEYEKFSGAYVNNRIRTTKYTLLNFVPRNLFEQFHRAASLYFLFLVVLNWVPLVEAFQKEITMLPLVVVLTIIAIKDGLEDYRKYKIDKQINNLITKVYSRKEKKYIDRCWKDVTVGDFIRLSCNEVIPADMVLLFSTDPDGICHIETSGLDGESNLKQRQVVRGYAEQDSEVDPEKFSSRIECESPNNDLSRFRGFLEHSNKERVGLSKENLLLRGCTIRNTEAVVGIVVYAGHETKAMLNNSGPRYKRSKLERRANTDVLWCVMLLVIMCLTGAVGHGIWLSRYEKMHFFNVPEPDGHIISPLLAGFYMFWTMIILLQVLIPISLYVSIEIVKLGQIYFIQSDVDFYNEKMDSIVQCRALNIAEDLGQIQYLFSDKTGTLTENKMVFRRCSVAGFDYCHEENARRLESYQEAVSEDEDFIDTVSGSLSNMAKPRAPSCRTVHNGPLGNKPSNHLAGSSFTLGSGEGASEVPHSRQAAFSSPIETDVVPDTRLLDKFSQITPRLFMPLDETIQNPPMETLYIIDFFIALAICNTVVVSAPNQPRQKIRHPSLGGLPIKSLEEIKSLFQRWSVRRSSSPSLNSGKEPSSGVPNAFVSRLPLFSRMKPASPVEEEVSQVCESPQCSSSSACCTETEKQHGDAGLLNGKAESLPGQPLACNLCYEAESPDEAALVYAARAYQCTLRSRTPEQVMVDFAALGPLTFQLLHILPFDSVRKRMSVVVRHPLSNQVVVYTKGADSVIMELLSVASPDGASLEKQQMIVREKTQKHLDDYAKQGLRTLCIAKKVMSDTEYAEWLRNHFLAETSIDNREELLLESAMRLENKLTLLGATGIEDRLQEGVPESIEALHKAGIKIWMLTGDKQETAVNIAYACKLLEPDDKLFILNTQSKDACGMLMSTILKELQKKTQALPEQVSLSEDLLQPPVPRDSGLRAGLIITGKTLEFALQESLQKQFLELTSWCQAVVCCRATPLQKSEVVKLVRSHLQVMTLAIGDGANDVSMIQVADIGIGVSGQEGMQAVMASDFAVSQFKHLSKLLLVHGHWCYTRLSNMILYFFYKNVAYVNLLFWYQFFCGFSGTSMTDYWVLIFFNLLFTSAPPVIYGVLEKDVSAETLMQLPELYRSGQKSEAYLPHTFWITLLDAFYQSLVCFFVPYFTYQGSDTDIFAFGNPLNTAALFIVLLHLVIESKSLTWIHLLVIIGSILSYFLFAIVFGAMCVTCNPPSNPYWIMQEHMLDPVFYLVCILTTSIALLPRFVYRVLQGSLFPSPILRAKHFDRLTPEERTKALKKWRGAGKMNQVTSKYANQSAGKSGRRPMPGPSAVFAMKSATSCAIEQGNLSLCETALDQGYSETKAFEMAGPSKGKES

SEQ ID NO: 63 - DNA, 4281 bp, Homo sapiens
  CDS (1)...(4281)
atgactgaggctctccaatgggccagatatcactggcgacggctgatcagaggtgcaaccagggatgatgattcagggccatacaactattcctcgttgctcgcctgtgggcgcaagtcctctcagatccctaaactgtcaggaaggcaccggattgttgttccccacatccagcccttcaaggatgagtatgagaagttctccggagcctatgtgaacaatcgaatacgaacaacaaagtacacacttctgaattttgtgccaagaaatttatttgaacaatttcacagagctgccagtttatatttcctgttcctagttgtcctgaactgggtacctttggtagaagccttccaaaaggaaatcaccatgttgcctctggtggtggtccttacaattatcgcaattaaagatggcctggaagattatcggaaatacaaaattgacaaacagatcaataatttaataactaaagtttatagtaggaaagagaaaaaatacattgaccgatgctggaaagacgttactgttggggactttattcgcctctcctgcaatgaggtcatccctgcagacatggtactactcttttccactgatccagatggaatctgtcacattgagacttctggtcttgatggagagagcaatttaaaacagaggcaggtggttcggggatatgcagaacaggactctgaagttgatcctgagaagttttccagtaggatagaatgtgaaagcccaaacaatgacctcagcagattccgaggcttcctagaacattccaacaaagaacgcgtgggtctcagtaaagaaaatttgttgcttagaggatgcaccattagaaacacagaggctgttgtgggcattgtggtttatgcaggccatgaaaccaaagcaatgctgaacaacagtgggccacggtataagcgcagcaaattagaaagaagagcaaacacagatgtcctctggtgtgtcatgcttctggtcataatgtgcttaactggcgcagtaggtcatggaatctggctgagcaggtatgaaaagatgcattttttcaatgttcccgagcctgatggacatatcatatcaccactgttggcaggattttatatgttttggaccatgatcattttgttacaggtcttgattcctatttctctctatgtttccatcgaaattgtgaagcttggacaaatatatttcattcaaagtgatgtggatttctacaatgaaaaaatggattctattgttcagtgccgagccctgaacatcgccgaggatctgggacagattcagtacctcttttccgataagacaggaaccctcactgagaataagatggtttttcgaagatgtagtgtggcaggatttgattactgccatgaagaaaatgccaggaggttggagtcctatcaggaagctgtctctgaagatgaagattttatagacacagtcagtggttccctcagcaatatggcaaaaccgagagcccccagctgcaggacagttcataatgggcctttgggaaataagccctcaaatcatcttgctgggagctcttttactctaggaagtggagaaggagccagtgaagtgcctcattccagacaggctgctttcagtagccccattgaaacagacgtggtaccagacaccaggcttttagacaaatttagtcagattacacctcggctctttatgccactagatgagaccatccaaaatccaccaatggaaactttgtacattatcgactttttcattgcattggcaatttgcaacacagtagtggtttctgctcctaaccaaccccgacaaaagatcagacacccttcactgggggggttgcccattaagtctttggaagagattaaaagtcttttccagagatggtctgtccgaagatcaagttctccatcgcttaacagtgggaaagagccatcttctggagttccaaacgcctttgtgagcagactccctctctttagtcgaatgaaaccagcttcacctgtggaggaagaggtctcccaggtgtgtgagagcccccagtgctccagtagctcagcttgctgcacagaaacagagaaacaacacggtgatgcaggcctcctgaatggcaaggcagagtccctccctggacagccattggcctgcaacctgtgttatgaggccgagagcccagacgaagcggccttagtgtatgccgccagggcttaccaatgcactttacggtctcggacaccagagcaggtcatggtggactttgctgctttgggaccattaacatttcaactcctacacatcctgccctttgactcagtaagaaaaagaatgtctgttgtggtccgacaccctctttccaatcaagttgtggtgtatacgaaaggcgctgattctgtgatcatggagttactgtcggtggcttccccagatggagcaagtctggagaaacaacagatgatagtaagggagaaaacccagaagcacttggatgactatgccaaacaaggccttcgtactttatgtatagcaaagaaggtcatgagtgacactgaatatgcagagtggctgaggaatcattttttagctgaaaccagcattgacaacagggaagaattactacttgaatctgccatgaggttggagaacaaacttacattacttggtgctactggcattgaagaccgtctgcaggagggagtccctgaatctatagaagctcttcacaaagcgggcatcaagatctggatgctgacaggggacaagcaggagacagctgtcaacatagcttatgcatgcaaactactggagccagatgacaagctttttatcctcaatacccaaagtaaagatgcctgtgggatgctgatgagcacaattttgaaagaacttcagaagaaaactcaagccctgccagagcaagtgtcattaagtgaagatttacttcagcctcctgtcccccgggactcagggttacgagctggactcattatcactgggaagaccctggagtttgccctgcaagaaagtctgcaaaagcagttcctggaactgacatcttggtgtcaagctgtggtctgctgccgagccacaccgctgcagaaaagtgaagtggtgaaattggtccgcagccatctccaggtgatgacccttgctattggtgatggtgccaatgatgttagcatgatacaagtggcagacattgggataggggtctcaggtcaagaaggcatgcaggctgtgatggccagtgactttgccgtttctcagttcaaacatctcagcaagctccttcttgtccatggacactggtgttatacacggctttccaacatgattctctattttttctataagaatgtggcctatgtgaacctccttttctggtaccagttcttttgtggattttcaggaacatccatgactgattactgggttttgatcttcttcaacctcctcttcacatctgcccctcctgtcatttatggtgttttggagaaagatgtgtctgcagagaccctcatgcaactgcctgaactttacagaagtggtcagaaatcagaggcatacttaccccataccttctggatcaccttattggatgctttttatcaaagcctggtctgcttctttgtgccttattttacctaccagggctcagatactgacatctttgcatttggaaaccccctgaacacagccgctctgttcatcgttctcctccatctggtcattgaaagcaagagtttgacttggattcacttgctggtcatcattggtagcatcttgtcttattttttatttgccatagtttttggagccatgtgtgtaacttgcaacccaccatccaacccttactggattatgcaggagcacatgctggatccagtattctacttagtttgtatcctcacgacgtccattgctcttctgcccaggtttgtatacagagttcttcagggatccctgtttccatctccaattctgagagctaagcactttgacagactaactccagaggagaggactaaagctctcaagaagtggagaggggctggaaagatgaatcaagtgacatcaaagtatgctaaccaatcagctggcaagtcaggaagaagacccatgcctggcccttctgctgtatttgcaatgaagtcagcaacttcctgtgctattgagcaaggaaacttatctctgtgtgaaactgctttagatcaaggctactctgaaactaaggcctttgagatggctggaccctccaaaggtaaagaaagctag

SEQ ID NO: 64 - DNA, 7221 bp, Homo sapiens
  CDS (167)...(3700)
gccgcgggatgggaacgcggcgcggggagtgaggcagtggcggcggcggcggtaagcggaacttcggcccgaggggctcgcccgctcccgcctctgtcttgtcggcctccacctgcagccccgcggcccccgcgccccgcgggacccggacggcgacgacgggggaatgtggcgctggatccggcagcagctgggttttgacccaccacatcagagtgacacaagaaccatctacgtagcccacaggtttcctcagaatggcctttacacacctcagaaatttatagataacaggatcatttcatctaagtacactgtgtggaattttgttccaaaaaatttatttgaacagttcagaagagtggcaaacttttattttcttattatatttttggttcagcttatgattgatacacctaccagtccagttaccagtggacttccattattctttgtgataacagtaactgccataaagcagggatatgaagattggttacggcataactcagataatgaagtaaatggagctcctgtttatgttgttcgaagtggtggccttgtaaaaactagatcaaaaaacattcgggtgggtgatattgttcgaatagccaaagatgaaatttttcctgcagacttggtgcttctgtcctcagatcgactggatggttcctgtcacgttacaactgctagtttggacggagaaactaacctgaagacacatgtggcagttccagaaacagcattattacaaacagttgccaatttggacactctagtagctgtaatagaatgccagcaaccagaagcagacttatacagattcatgggacgaatgatcataacccaacaaatggaagaaattgtaagacctctggggccggagagtctcctgcttcgtggagccagattaaaaaacacaaaagaaatttttggtgttgcggtatacactggaatggaaactaagatggcattaaattacaagagcaaatcacagaaacgatctgcagtagaaaagtcaatgaatacatttttgataatttatctagtaattcttatatctgaagctgtcatcagcactatcttgaagtatacatggcaagctgaagaaaaatgggatgaaccttggtataaccaaaaaacagaacatcaaagaaatagcagtaagattctgagatttatttcagacttccttgcttttttggttctctacaatttcatcattccaatttcattatatgtgacagtcgaaatgcagaaatttcttggatcattttttattggctgggatcttgatctgtatcatgaagaatcagatcagaaagctcaagtcaatacttccgatctgaatgaagagcttggacaggtagagtacgtgtttacagataaaactggtacactgacagaaaatgagatgcagtttcgggaatgttcaattaatggcatgaaataccaagaaattaatggtagacttgtacccgaaggaccaacaccagactcttcagaaggaaacttatcttatcttagtagtttatcccatcttaacaacttatcccatcttacaaccagttcctctttcagaaccagtcctgaaaatgaaactgaactaattaaagaacatgatctcttctttaaagcagtcagtctctgtcacactgtacagattagcaatgttcaaactgactgcactggtgatggtccctggcaatccaacctggcaccatcgcagttggagtactatgcatcttcaccagatgaaaaggctctagtagaagctgctgcaaggattggtattgtgtttattggcaattctgaagaaactatggaggttaaaactcttggaaaactggaacggtacaaactgcttcatattctggaatttgattcagatcgtaggagaatgagtgtaattgttcaggcaccttcaggtgagaagttattatttgctaaaggagctgagtcatcaattctccctaaatgtataggtggagaaatagaaaaaaccagaattcatgtagatgaatttgctttgaaagggctaagaactctgtgtatagcatatagaaaatttacatcaaaagagtatgaggaaatagataaacgcatatttgaagccaggactgccttgcagcagcgggaagagaaattggcagctgttttccagttcatagagaaagacctgatattacttggagccacagcagtagaagacagactacaagataaagttcgagaaactattgaagcattgagaatggctggtatcaaagtatgggtacttactggggataaacatgaaacagctgttagtgtgagtttatcatgtggccattttcatagaaccatgaacatccttgaacttataaaccagaaatcagacagcgagtgtgctgaacaattgaggcagcttgccagaagaattacagaggatcatgtgattcagcatgggctggtagtggatgggaccagcctatctcttgcactcagggagcatgaaaaactatttatggaagtttgcagaaattgttcagctgtattatgctgtcgtatggctccactgcagaaagcaaaagtaataagactaataaaaatatcacctgagaaacctataacattggctgttggtgatggtgctaatgacgtaagcatgatacaagaagcccatgttggcataggaatcatgggtaaagaaggaagacaggctgcaagaaacagtgactatgcaatagccagatttaagttcctctccaaattgctttttgttcatggtcatttttattatattagaatagctacccttgtacagtattttttttataagaatgtgtgctttatcacaccccagtttttatatcagttctactgtttgttttctcagcaaacattgtatgacagcgtgtacctgactttatacaatatttgttttacttccctacctattctgatatatagtcttttggaacagcatgtagaccctcatgtgttacaaaataagcccaccctttatcgagacattagtaaaaaccgcctcttaagtattaaaacatttctttattggaccatcctgggcttcagtcatgcctttattttcttttttggatcctatttactaatagggaaagatacatctctgcttggaaatggccagatgtttggaaactggacatttggcactttggtcttcacagtcatggttattacagtcacagtaaagatggctctggaaactcatttttggacttggatcaaccatctcgttacctggggatctattatattttattttgtattttccttgttttatggagggattctctggccatttttgggctcccagaatatgtattttgtgtttattcagctcctgtcaagtggttctgcttggtttgccataatcctcatggttgttacatgtctatttcttgatatcataaagaaggtctttgaccgacacctccaccctacaagtactgaaaaggcacagcttactgaaacaaatgcaggtatcaagtgcttggactccatgtgctgtttcccggaaggagaagcagcgtgtgcatctgttggaagaatgctggaacgagttataggaagatgtagtccaacccacatcagcagttcatggagtgcatcggatcctttctataccaacgacaggagcatcttgactctctccacaatggactcatctacttgttaaaggggcagtagtactttgtgggagccagttcacctcctttcctaaaattcagtgtgatcaccctgttaatggccacactagctctgaaattaatttccaaaatctttgtagtagttcatacccactcagagttataatggcaaacaaacagaaagcattagtacaagcccctcccaacacccttaatttgaatctgaacatgttaaaatttgagaataaagagacatttttcatctctttgtctggtttgtcccttgtgcttatgggactcctaatggcatttcagtctgttgctgaggccattatattttaatataaatgtagaaaaaagagagaaatcttagtaaagagtattttttagtattagcttgattattgactcttctatttaaatctgcttctgtaaattatgctgaaagtttgccttgagaactctatttttttattagagttatatttaaagcttttcatgggaaaagttaatgtgaatactgaggaattttggtccctcagtgacctgtgttgttaattcattaatgcattctgagttcacagagcaaattaggagaatcatttccaaccattatttactgcagtatggggagtaaatttataccaattcctctaactgtactgtaacacagcctgtaaagttagccatataaatgcaagggtatatcatatatacaaatcaggaatcaggtccgttcaccgaacttcaaattgatgtttactaatatttttgtgacagagtataaagaccctatagtgggtaaattagatactattagcatattattaatttaatgtctttatcattggatcttttgcatgctttaatctggttaacatatttaaatttgctttttttctctttacctgaaggctctgtgtatagtatttcatgacatcgttgtacagtttaactatcaataaaaagtttggacagtatttaaatattgcaaatatgtttaattatacaaatcagaatagtatgggtaattaaatgaatacaaaaagaagagcctctttctgcagccgacttagacatgctcttccctttctataagctagattttagaataaagggtttcagttaataatcttattttcaggttatgtcatctaacttatagcaaactaccacaatacagtgagttctgccagtgtcccagtacaaggcatatttcaggtgtggctgtggaatgtaaaaatgctcaacttgtatcaggtaatgttagcaataaattaaatgctaagaatgattaatcgggtacatgttactgtaattaactcattgcacttcaaaacctaacttccatcctgaatttatcaagtagttcagtattgtcatttgtttttgttttattgaaaagtaatgttgtcttaagatttagaagtgattattagcttgagaactattacccagctctaagcaaataatgattgtatacatattaagataatggttaaatgcggttttaccaagttttcccttgaaaatgtaattcctttatggagatttattgtgcagccctaagcttccttcccatttcatgaatataaggcttctagaattggactggcaggggaaagaatggtagagacagaaattaagactttatccttgtttgcttgtaaactattattttcttgctaatgtaacatttgtctgttccagtgatgtaaggatattaagttattaagctaaatattaattttcaaaaatagtccttctttaacttagatatttcatagctggatttaggaagatctgttattctggaagtactaaaaagaataatacaacgtacaatgtctgcattcactaattcatgttccagaagaggaaataatgaagatatactcagtagagtactaggtgggaggatatggaaatttgctcataaaatctcttataaaacgtgcatataacaaaatgacacccagtaggcctgcattacatttacatgaccgtgtttatttgccatcaaataaactgagtactgacaccagacaaagactccaaagtcataaaatagcctatgaccaactgcagcaagacaggaggtcagctcgcctataatggtgcttaaagtgtgattgatgtaattttctgtactcaccatttgaagttagttaaggagaactttatttttttaaaaaaagtaaatggcaaccactagtgtgctcatcctgaactgttactccaaatccactccgtttttaaagcaaaattatcttgtgattttaagaaaagagttttctatttatttaagaaagtaacaatgcagtctgcaagctttcagtagttttctagtgctatattcatcctgtaaaactcttactacgtaaccagtaatcacaaggaaagtgtcccctttgcatatttctttaaaattctttctttggaaagtatgatgttgataattaacttacccttatctgccaaaaccagagcaaaatgctaaatacgttattgctaatcagtggtctcaaatcgatttgcctccctttgcctcgtctgagggctgtaagcctgaagatagtggcaagcaccaagtcagtttccaaaattgcccctcagctgctttaagtgactcagcaccctgcctcagcttcagcaggcgtaggctcaccctgggcggagcaaagtatgggccagggagaactacagctacgaagacctgctgtcgagttgagaaaaggggagaatttatggtctgaattttctaactgtcctctttcttgggtctaaagctcataatacacaaaggcttccagacctgagccacacccaggccctatcctgaacaggagactaaacagaggcaaatcaaccctaggaaatacttgcattctgccctacggttagtaccaggactgaggtcatttctactggaaaagattgtgagattgaacttatctgatcgcttgagactcctaataggcaggagtcaaggccactagaaaattgacagttaagagccaaaagtttttaaaatatgctactctgaaaaatctcgtgaaggctgtaggaaaagggagaatcttccatgttggtgtttttcctgtaaagatcagtttggggtatgatataagcaggtattaataaaaataacacaccaaagagttacgtaaaacatgttttattaattttggtccccacgtacagacattttatttctattttgaaatgagttatctattttcataaaagtaaaacactattaaagtgctgttttatgtgaaataacttgaatgttgttcctataaaaaatagatcataactcatgatatgtttgtaatcatggtaatttagatttttatgaggaatgagtatctggaaatattgtagcaatacttggtttaaaattttggacctgagacactgtggctgtctaatgtaatcctttaaaaattctctgcattgtcagtaaatgtagtatattattgtacagctactcataattttttaaagtttatgaagttatatttatcaaataaaaactttcctatat

SEQ ID NO: 65 - protein, 1177 aa, Homo sapiens
MWRWIRQQLGFDPPHQSDTRTIYVAHRFPQNGLYTPQKFIDNRIISSKYTVWNFVPKNLFEQFRRVANFYFLIIFLVQLMIDTPTSPVTSGLPLFFVITVTAIKQGYEDWLRHNSDNEVNGAPVYVVRSGGLVKTRSKNIRVGDIVRIAKDEIFPADLVLLSSDRLDGSCHVTTASLDGETNLKTHVAVPETALLQTVANLDTLVAVIECQQPEADLYRFMGRMIITQQMEEIVRPLGPESLLLRGARLKNTKEIFGVAVYTGMETKMALNYKSKSQKRSAVEKSMNTFLIIYLVILISEAVISTILKYTWQAEEKWDEPWYNQKTEHQRNSSKILRFISDFLAFLVLYNFIIPISLYVTVEMQKFLGSFFIGWDLDLYHEESDQKAQVNTSDLNEELGQVEYVFTDKTGTLTENEMQFRECSINGMKYQEINGRLVPEGPTPDSSEGNLSYLSSLSHLNNLSHLTTSSSFRTSPENETELIKEHDLFFKAVSLCHTVQISNVQTDCTGDGPWQSNLAPSQLEYYASSPDEKALVEAAARIGIVFIGNSEETMEVKTLGKLERYKLLHILEFDSDRRRMSVIVQAPSGEKLLFAKGAESSILPKCIGGEIEKTRIHVDEFALKGLRTLCIAYRKFTSKEYEEIDKRIFEARTALQQREEKLAAVFQFIEKDLILLGATAVEDRLQDKVRETIEALRMAGIKVWVLTGDKHETAVSVSLSCGHFHRTMNILELINQKSDSECAEQLRQLARRITEDHVIQHGLVVDGTSLSLALREHEKLFMEVCRNCSAVLCCRMAPLQKAKVIRLIKISPEKPITLAVGDGANDVSMIQEAHVGIGIMGKEGRQAARNSDYAIARFKFLSKLLFVHGHFYYIRIATLVQYFFYKNVCFITPQFLYQFYCLFSQQTLYDSVYLTLYNICFTSLPILIYSLLEQHVDPHVLQNKPTLYRDISKNRLLSIKTFLYWTILGFSHAFIFFFGSYLLIGKDTSLLGNGQMFGNWTFGTLVFTVMVITVTVKMALETHFWTWINHLVTWGSIIFYFVFSLFYGGILWPFLGSQNMYFVFIQLLSSGSAWFAIILMVVTCLFLDIIKKVFDRHLHPTSTEKAQLTETNAGIKCLDSMCCFPEGEAACASVGRMLERVIGRCSPTHISSSWSASDPFYTNDRSILTLSTMDSSTC

SEQ ID NO: 66 - DNA, 3534 bp, Homo sapiens
  CDS (1)...(3534)
atgtggcgctggatccggcagcagctgggttttgacccaccacatcagagtgacacaagaaccatctacgtagcccacaggtttcctcagaatggcctttacacacctcagaaatttatagataacaggatcatttcatctaagtacactgtgtggaattttgttccaaaaaatttatttgaacagttcagaagagtggcaaacttttattttcttattatatttttggttcagcttatgattgatacacctaccagtccagttaccagtggacttccattattctttgtgataacagtaactgccataaagcagggatatgaagattggttacggcataactcagataatgaagtaaatggagctcctgtttatgttgttcgaagtggtggccttgtaaaaactagatcaaaaaacattcgggtgggtgatattgttcgaatagccaaagatgaaatttttcctgcagacttggtgcttctgtcctcagatcgactggatggttcctgtcacgttacaactgctagtttggacggagaaactaacctgaagacacatgtggcagttccagaaacagcattattacaaacagttgccaatttggacactctagtagctgtaatagaatgccagcaaccagaagcagacttatacagattcatgggacgaatgatcataacccaacaaatggaagaaattgtaagacctctggggccggagagtctcctgcttcgtggagccagattaaaaaacacaaaagaaatttttggtgttgcggtatacactggaatggaaactaagatggcattaaattacaagagcaaatcacagaaacgatctgcagtagaaaagtcaatgaatacatttttgataatttatctagtaattcttatatctgaagctgtcatcagcactatcttgaagtatacatggcaagctgaagaaaaatgggatgaaccttggtataaccaaaaaacagaacatcaaagaaatagcagtaagattctgagatttatttcagacttccttgcttttttggttctctacaatttcatcattccaatttcattatatgtgacagtcgaaatgcagaaatttcttggatcattttttattggctgggatcttgatctgtatcatgaagaatcagatcagaaagctcaagtcaatacttccgatctgaatgaagagcttggacaggtagagtacgtgtttacagataaaactggtacactgacagaaaatgagatgcagtttcgggaatgttcaattaatggcatgaaataccaagaaattaatggtagacttgtacccgaaggaccaacaccagactcttcagaaggaaacttatcttatcttagtagtttatcccatcttaacaacttatcccatcttacaaccagttcctctttcagaaccagtcctgaaaatgaaactgaactaattaaagaacatgatctcttctttaaagcagtcagtctctgtcacactgtacagattagcaatgttcaaactgactgcactggtgatggtccctggcaatccaacctggcaccatcgcagttggagtactatgcatcttcaccagatgaaaaggctctagtagaagctgctgcaaggattggtattgtgtttattggcaattctgaagaaactatggaggttaaaactcttggaaaactggaacggtacaaactgcttcatattctggaatttgattcagatcgtaggagaatgagtgtaattgttcaggcaccttcaggtgagaagttattatttgctaaaggagctgagtcatcaattctccctaaatgtataggtggagaaatagaaaaaaccagaattcatgtagatgaatttgctttgaaagggctaagaactctgtgtatagcatatagaaaatttacatcaaaagagtatgaggaaatagataaacgcatatttgaagccaggactgccttgcagcagcgggaagagaaattggcagctgttttccagttcatagagaaagacctgatattacttggagccacagcagtagaagacagactacaagataaagttcgagaaactattgaagcattgagaatggctggtatcaaagtatgggtacttactggggataaacatgaaacagctgttagtgtgagtttatcatgtggccattttcatagaaccatgaacatccttgaacttataaaccagaaatcagacagcgagtgtgctgaacaattgaggcagcttgccagaagaattacagaggatcatgtgattcagcatgggctggtagtggatgggaccagcctatctcttgcactcagggagcatgaaaaactatttatggaagtttgcagaaattgttcagctgtattatgctgtcgtatggctccactgcagaaagcaaaagtaataagactaataaaaatatcacctgagaaacctataacattggctgttggtgatggtgctaatgacgtaagcatgatacaagaagcccatgttggcataggaatcatgggtaaagaaggaagacaggctgcaagaaacagtgactatgcaatagccagatttaagttcctctccaaattgctttttgttcatggtcatttttattatattagaatagctacccttgtacagtattttttttataagaatgtgtgctttatcacaccccagtttttatatcagttctactgtttgttttctcagcaaacattgtatgacagcgtgtacctgactttatacaatatttgttttacttccctacctattctgatatatagtcttttggaacagcatgtagaccctcatgtgttacaaaataagcccaccctttatcgagacattagtaaaaaccgcctcttaagtattaaaacatttctttattggaccatcctgggcttcagtcatgcctttattttcttttttggatcctatttactaatagggaaagatacatctctgcttggaaatggccagatgtttggaaactggacatttggcactttggtcttcacagtcatggttattacagtcacagtaaagatggctctggaaactcatttttggacttggatcaaccatctcgttacctggggatctattatattttattttgtattttccttgttttatggagggattctctggccatttttgggctcccagaatatgtattttgtgtttattcagctcctgtcaagtggttctgcttggtttgccataatcctcatggttgttacatgtctatttcttgatatcataaagaaggtctttgaccgacacctccaccctacaagtactgaaaaggcacagcttactgaaacaaatgcaggtatcaagtgcttggactccatgtgctgtttcccggaaggagaagcagcgtgtgcatctgttggaagaatgctggaacgagttataggaagatgtagtccaacccacatcagcagttcatggagtgcatcggatcctttctataccaacgacaggagcatcttgactctctccacaatggactcatctacttgttaa

SEQ ID NO: 67 - DNA, 4198 bp, Homo sapiens
  CDS (156)...(3410)
ggagtcgacccacgcgtccgcattgagacaatgcctccacaaatacttgatgcaaaattcagtaagacagcacttgttgaatcaccattatagtttctgacaaattgttctcaaaaaggtaccagctggaggatgagtctgcgcatttggatgaaatgccactaatgatgtctgaagaaggctttgagaatgaggaaagtgattaccacaccttaccacgagccaggataatgcaaaggaaaagaggactggagtggtttgtctgtgatggctggaagttcctctgtaccagttgctgtggttggctgataaatatttgtcgaagaaagaaagagctgaaagctcgcacagtatggcttggatgtcctgaaaagtgtgaagaaaaacatcccaggaattctataaaaaatcaaaaatacaatgtgtttacctttatacctggggttttgtatgaacaattcaagtttttcttgaatctctattttctagtgatatcctgctcacagtttgtaccagcattgaaaataggctatctctacacctactgggctcctctgggatttgtcttggctgttactatgacacgggaagcaattgatgaatttcggcgttttcagcgtgacaaggaagtgaattcacaactatatagcaagcttacagtaagaggtaaagtgcaagttaagagttcagacatacaagttggagacctcatcatagtggaaaagaatcaaagaattccatcggacatggtgtttcttaggacttcagaaaaagcaggttcgtgttttattcgaactgatcaactagatggtgaaactgactggaagctgaaggtggcagtgagctgcacgcaacagctgccggctctgggggaccttttttctatcagtgcttatgtttatgctcagaaaccacaaatggacattcacagtttcgaaggcacatttaccagggaagacagtgacccgcccattcatgaaagtctcagcatagaaaatacattgtgggcaagcaccattgttgcatcaggtactgtaataggtgttgtcatttataccggaaaagagactcgaagtgtaatgaacacatccaatccaaaaaataaggttggtttgttggaccttgaactcaatcggctgacgaaagcgctatttttggctttagttgctctttccattgttatggtaaccttacaaggatttgtgggtccatggtaccgcaatctttttcggttccttctcctcttttcttacatcattcccataagtttgcgtgtgaacttggacatgggcaaagcggtgtatggatggatgatgatgaaagatgagaacatccctggcacggtcgttcggaccagcactatcccagaggaacttgggcgcctggtgtatttattgacagacaaaacaggaaccctcacccagaatgaaatgatatttaagcggctgcacctgggcaccgtgtcctatggcgccgacacgatggatgagatccagagccatgtcagggactcctactcacagatgcagtctcaagctggtggaaacaatactggttcaactccactaagaaaagcccaatcttcagctcccaaagttaggaaaagtgtcagtagtcgaatccatgaagccgtgaaagccatcgtgctgtgtcacaacgtgacccccgtgtatgagtctcgggccggcgttactgaggagactgagttcgcagaggctgaccaagacttcagtgatgagaatcgcacctaccaggcttccagcccggatgaggtcgctctggtgcagtggacagagagtgtgggcctcacgctggtcagcagggacctcacctccatgcagctgaagacccccagtggccaggtcctcagcttctgcattctgcagctgtttcccttcacctccgagagcaagcggatgggcgtcatcgtcagggatgaatccacggcagaaatcacattctacatgaagggcgctgacgtggccatgtctcctatcgtgcagtataatgactggctggaagaggagtgcggaaacatggctcgcgaaggactgcggaccctcgtggttgcaaagaaggcgttgacagaggagcagtaccaggactttgagagccgatacactcaagccaagctgagcatgcacgacaggtccctcaaggtggccgcggtagtcgagagcctggagagggagatggaactgctgtgcctcaccggcgtggaggaccagctgcaggcagacgtgcggcccacgctggagatgctgcgcaacgccgggatcaagatatggatgctaacaggcgataaactcgagacagctacctgcattgccaaaagttcacatctcgtgtctagaacacaagatattcatattttcagacaggtaaccagtcggggagaggcacatttggagctgaatgcatttcgaaggaagcatgattgtgcactagtcatatctggggactctctggaggtttgtctaaagtactacgagcatgaatttgtggagctggcctgccagtgccctgccgtggtttgctgccgctgctcacccacccagaaggcccgcattgtgacactgctgcagcagcacacagggagacgcacctgcgccatcggtgatggaggaaatgatgtcagcatgattcaggcagcagactgtgggattgggattgagggaaaggagggtaaacaggcctcgctggcggccgacttctccatcacgcagttccggcacataggcaggctgctcatggtgcacgggcggaacagctacaagaggtcggcggcactcggccagttcgtcatgcacaggggccttatcatctccaccatgcaggctgtgttttcctcagtcttctacttcgcatccgtccctttgtatcagggcttcctcatggtggggtatgccaccatatacaccatgttcccagtgttctccttagtgctggaccaggacgtgaagccagagatggcgatgctctacccggagctgtacaaggacctcaccaagggaagatccttgtccttcaaaaccttcctcatctgggttttaataagtatttaccaaggcggcatcctcatgtatggggccctggtgctcttcgagtctgagttcgtccacgtggtggccatctccttcaccgcactgatcctgaccgagctgctgatggtggcgctgaccgtccgcacgtggcactggctgatggtggtggccgagttcctcagcttaggctgctacgtgtcctcactcgcttttctcaatgaatattttgatgttgcctttatcaccaccgtgaccttcctgtggaaagtgtcggcgatcaccgtggtcagctgcctcccgctgtatgtcctcaagtacctgaggcgcaagtcttctcctcccagctactgcaagctggcctcctaaggggctgtgcacccccagcgggctggccccagcaccttctgcccttcccagcaccttgtgcccttgccagtgaacgcagggtttgccattgctaccaagcaagcaccacaagaaagggagggtacgccaggcgagcccagggcacagatgctgagacagcctctccttctcagtgcagggacgtcacccctgccaggcaagcccagggcacagatgccaggatggcttctccctctcagtgcgaggcttcacccctgccaggcaagcccagggcatagatgctgagacagcctctccctctcagtgcagggacgtcacccctgccaggcaagcccagggcacagaggccgggacggcctctccctctcagtgtgaggcttcacccatgctaggcaagcccagggcacagatgccgggatggcccctccctctcagtgcgggaacgtcacccctgccaggcaagcccagggcacagatgctgcgatggcctcttcctcttaagtgtggggcctcacccctgcttttctttctttttttgtattgtcaaaattgtatttccatattgaagcagcttgagtttctactgaaaatgagcccgaattatttcactattactgtaaagggttcatcttactctggcattctgagaattagactgaaagtttaatttctgcagttccctcatattcagattctttctttgatgttataacacaaagtcattcctactcaaatgtaataaaattgaggctccacggagaaaaaaaaaaaaaaaaaaaaaaaaaaaa

SEQ ID NO: 68 - protein, 1084 aa, Homo sapiens
MPLMMSEEGFENEESDYHTLPRARIMQRKRGLEWFVCDGWKFLCTSCCGWLINICRRKKELKARTVWLGCPEKCEEKHPRNSIKNQKYNVFTFIPGVLYEQFKFFLNLYFLVISCSQFVPALKIGYLYTYWAPLGFVLAVTMTREAIDEFRRFQRDKEVNSQLYSKLTVRGKVQVKSSDIQVGDLIIVEKNQRIPSDMVFLRTSEKAGSCFIRTDQLDGETDWKLKVAVSCTQQLPALGDLFSISAYVYAQKPQMDIHSFEGTFTREDSDPPIHESLSIENTLWASTIVASGTVIGVVIYTGKETRSVMNTSNPKNKVGLLDLELNRLTKALFLALVALSIVMVTLQGFVGPWYRNLFRFLLLFSYIIPISLRVNLDMGKAVYGWMMMKDENIPGTVVRTSTIPEELGRLVYLLTDKTGTLTQNEMIFKRLHLGTVSYGADTMDEIQSHVRDSYSQMQSQAGGNNTGSTPLRKAQSSAPKVRKSVSSRIHEAVKAIVLCHNVTPVYESRAGVTEETEFAEADQDFSDENRTYQASSPDEVALVQWTESVGLTLVSRDLTSMQLKTPSGQVLSFCILQLFPFTSESKRMGVIVRDESTAEITFYMKGADVAMSPIVQYNDWLEEECGNMAREGLRTLVVAKKALTEEQYQDFESRYTQAKLSMHDRSLKVAAVVESLEREMELLCLTGVEDQLQADVRPTLEMLRNAGIKIWMLTGDKLETATCIAKSSHLVSRTQDIHIFRQVTSRGEAHLELNAFRRKHDCALVISGDSLEVCLKYYEHEFVELACQCPAVVCCRCSPTQKARIVTLLQQHTGRRTCAIGDGGNDVSMIQAADCGIGIEGKEGKQASLAADFSITQFRHIGRLLMVHGRNSYKRSAALGQFVMHRGLIISTMQAVFSSVFYFASVPLYQGFLMVGYATIYTMFPVFSLVLDQDVKPEMAMLYPELYKDLTKGRSLSFKTFLIWVLISIYQGGILMYGALVLFESEFVHVVAISFTALILTELLMVALTVRTWHWLMVVAEFLSLGCYVSSLAFLNEYFDVAFITTVTFLWKVSAITVVSCLPLYVLKYLRRKSSPPSYCKLAS

SEQ ID NO: 69 - DNA, 3255 bp, Homo sapiens
  CDS (1)...(3255)
atgccactaatgatgtctgaagaaggctttgagaatgaggaaagtgattaccacaccttaccacgagccaggataatgcaaaggaaaagaggactggagtggtttgtctgtgatggctggaagttcctctgtaccagttgctgtggttggctgataaatatttgtcgaagaaagaaagagctgaaagctcgcacagtatggcttggatgtcctgaaaagtgtgaagaaaaacatcccaggaattctataaaaaatcaaaaatacaatgtgtttacctttatacctggggttttgtatgaacaattcaagtttttcttgaatctctattttctagtgatatcctgctcacagtttgtaccagcattgaaaataggctatctctacacctactgggctcctctgggatttgtcttggctgttactatgacacgggaagcaattgatgaatttcggcgttttcagcgtgacaaggaagtgaattcacaactatatagcaagcttacagtaagaggtaaagtgcaagttaagagttcagacatacaagttggagacctcatcatagtggaaaagaatcaaagaattccatcggacatggtgtttcttaggacttcagaaaaagcaggttcgtgttttattcgaactgatcaactagatggtgaaactgactggaagctgaaggtggcagtgagctgcacgcaacagctgccggctctgggggaccttttttctatcagtgcttatgtttatgctcagaaaccacaaatggacattcacagtttcgaaggcacatttaccagggaagacagtgacccgcccattcatgaaagtctcagcatagaaaatacattgtgggcaagcaccattgttgcatcaggtactgtaataggtgttgtcatttataccggaaaagagactcgaagtgtaatgaacacatccaatccaaaaaataaggttggtttgttggaccttgaactcaatcggctgacgaaagcgctatttttggctttagttgctctttccattgttatggtaaccttacaaggatttgtgggtccatggtaccgcaatctttttcggttccttctcctcttttcttacatcattcccataagtttgcgtgtgaacttggacatgggcaaagcggtgtatggatggatgatgatgaaagatgagaacatccctggcacggtcgttcggaccagcactatcccagaggaacttgggcgcctggtgtatttattgacagacaaaacaggaaccctcacccagaatgaaatgatatttaagcggctgcacctgggcaccgtgtcctatggcgccgacacgatggatgagatccagagccatgtcagggactcctactcacagatgcagtctcaagctggtggaaacaatactggttcaactccactaagaaaagcccaatcttcagctcccaaagttaggaaaagtgtcagtagtcgaatccatgaagccgtgaaagccatcgtgctgtgtcacaacgtgacccccgtgtatgagtctcgggccggcgttactgaggagactgagttcgcagaggctgaccaagacttcagtgatgagaatcgcacctaccaggcttccagcccggatgaggtcgctctggtgcagtggacagagagtgtgggcctcacgctggtcagcagggacctcacctccatgcagctgaagacccccagtggccaggtcctcagcttctgcattctgcagctgtttcccttcacctccgagagcaagcggatgggcgtcatcgtcagggatgaatccacggcagaaatcacattctacatgaagggcgctgacgtggccatgtctcctatcgtgcagtataatgactggctggaagaggagtgcggaaacatggctcgcgaaggactgcggaccctcgtggttgcaaagaaggcgttgacagaggagcagtaccaggactttgagagccgatacactcaagccaagctgagcatgcacgacaggtccctcaaggtggccgcggtagtcgagagcctggagagggagatggaactgctgtgcctcaccggcgtggaggaccagctgcaggcagacgtgcggcccacgctggagatgctgcgcaacgccgggatcaagatatggatgctaacaggcgataaactcgagacagctacctgcattgccaaaagttcacatctcgtgtctagaacacaagatattcatattttcagacaggtaaccagtcggggagaggcacatttggagctgaatgcatttcgaaggaagcatgattgtgcactagtcatatctggggactctctggaggtttgtctaaagtactacgagcatgaatttgtggagctggcctgccagtgccctgccgtggtttgctgccgctgctcacccacccagaaggcccgcattgtgacactgctgcagcagcacacagggagacgcacctgcgccatcggtgatggaggaaatgatgtcagcatgattcaggcagcagactgtgggattgggattgagggaaaggagggtaaacaggcctcgctggcggccgacttctccatcacgcagttccggcacataggcaggctgctcatggtgcacgggcggaacagctacaagaggtcggcggcactcggccagttcgtcatgcacaggggccttatcatctccaccatgcaggctgtgttttcctcagtcttctacttcgcatccgtccctttgtatcagggcttcctcatggtggggtatgccaccatatacaccatgttcccagtgttctccttagtgctggaccaggacgtgaagccagagatggcgatgctctacccggagctgtacaaggacctcaccaagggaagatccttgtccttcaaaaccttcctcatctgggttttaataagtatttaccaaggcggcatcctcatgtatggggccctggtgctcttcgagtctgagttcgtccacgtggtggccatctccttcaccgcactgatcctgaccgagctgctgatggtggcgctgaccgtccgcacgtggcactggctgatggtggtggccgagttcctcagcttaggctgctacgtgtcctcactcgcttttctcaatgaatattttgatgttgcctttatcaccaccgtgaccttcctgtggaaagtgtcggcgatcaccgtggtcagctgcctcccgctgtatgtcctcaagtacctgaggcgcaagtcttctcctcccagctactgcaagctggcctcctaa

SEQ ID NO: 70 - DNA, 4231 bp, Homo sapiens
  CDS (156)...(3443)
ggagtcgacccacgcgtccgcattgagacaatgcctccacaaatacttgatgcaaaattcagtaagacagcacttgttgaatcaccattatagtttctgacaaattgttctcaaaaaggtaccagctggaggatgagtctgcgcatttggatgaaatgccactaatgatgtctgaagaaggctttgagaatgaggaaagtgattaccacaccttaccacgagccaggataatgcaaaggaaaagaggactggagtggtttgtctgtgatggctggaagttcctctgtaccagttgctgtggttggctgataaatatttgtcgaagaaagaaagagctgaaagctcgcacagtatggcttggatgtcctgaaaagtgtgaagaaaaacatcccaggaattctataaaaaatcaaaaatacaatgtgtttacctttatacctggggttttgtatgaacaattcaagtttttcttgaatctctattttctagtgatatcctgctcacagtttgtaccagcattgaaaataggctatctctacacctactgggctcctctgggatttgtcttggctgttactatgacacgggaagcaattgatgaatttcggcgttttcagcgtgacaaggaagtgaattcacaactatatagcaagcttacagtaagaggtaaagtgcaagttaagagttcagacatacaagttggagacctcatcatagtggaaaagaatcaaagaattccatcggacatggtgtttcttaggacttcagaaaaagcaggttcgtgttttattcgaactgatcaactagatggtgaaactgactggaagctgaaggtggcagtgagctgcacgcaacagctgccggctctgggggaccttttttctatcagtgcttatgtttatgctcagaaaccacaaatggacattcacagtttcgaaggcacatttaccagggaagacagtgacccgcccattcatgaaagtctcagcatagaaaatacattgtgggcaagcaccattgttgcatcaggtactgtaataggtgttgtcatttataccggaaaagagactcgaagtgtaatgaacacatccaatccaaaaaataaggttggtttgttggaccttgaactcaatcggctgacgaaagcgctatttttggctttagttgctctttccattgttatggtaaccttacaaggatttgtgggtccatggtaccgcaatctttttcggttccttctcctcttttcttacatcattcccataagtttgcgtgtgaacttggacatgggcaaagcggtgtatggatggatgatgatgaaagatgagaacatccctggcacggtcgttcggaccagcactatcccagaggaacttgggcgcctggtgtatttattgacagacaaaacaggaaccctcacccagaatgaaatgatatttaagcggctgcacctgggcaccgtgtcctatggcgccgacacgatggatgagatccagagccatgtcagggactcctactcacagatgcagtctcaagctggtggaaacaatactggttcaactccactaagaaaagcccaatcttcagctcccaaagttaggaaaagtgtcagtagtcgaatccatgaagccgtgaaagccatcgtgctgtgtcacaacgtgacccccgtgtatgagtctcgggccggcgttactgaggagactgagttcgcagaggctgaccaagacttcagtgatgagaatcgcacctaccaggcttccagcccggatgaggtcgctctggtgcagtggacagagagtgtgggcctcacgctggtcagcagggacctcacctccatgcagctgaagacccccagtggccaggtcctcagcttctgcattctgcagctgtttcccttcacctccgagagcaagcggatgggcgtcatcgtcagggatgaatccacggcagaaatcacattctacatgaagggcgctgacgtggccatgtctcctatcgtgcagtataatgactggctggaagaggagtgcggaaacatggctcgcgaaggactgcggaccctcgtggttgcaaagaaggcgttgacagaggagcagtaccaggactttgagagccgatacactcaagccaagctgagcatgcacgacaggtccctcaaggtggccgcggtagtcgagagcctggagagggagatggaactgctgtgcctcaccggcgtggaggaccagctgcaggcagacgtgcggcccacgctggagatgctgcgcaacgccgggatcaagatatggatgctaacaggcgataaactcgagacagctacctgcattgccaaaagttcacatctcgtgtctagaacacaagatattcatattttcagacaggtaaccagtcggggagaggcacatttggagctgaatgcatttcgaaggaagcatgattgtgcactagtcatatctggggactctctggaggtttgtctaaagtactacgagcatgaatttgtggagctggcctgccagtgccctgccgtggtttgctgccgctgctcacccacccagaaggcccgcattgtgacactgctgcagcagcacacagggagacgcacctgcgccatcggtgatggaggaaatgatgtcagcatgattcaggcagcagactgtgggattgggattgagggaaaggagggtaaacaggcctcgctggcggccgacttctccatcacgcagttccggcacataggcaggctgctcatggtgcacgggcggaacagctacaagaggtcggcggcactcggccagttcgtcatgcacaggggccttatcatctccaccatgcaggctgtgttttcctcagtcttctacttcgcatccgtccctttgtatcagggcttcctcatggtggggtatgccaccatatacaccatgttcccagtgttctccttagtgctggaccaggacgtgaagccagagatggcgatgctctacccggagctgtacaaggacctcaccaagggaagatccttgtccttcaaaaccttcctcatctgggttttaataagtatttaccaaggcggcatcctcatgtatggggccctggtgctcttcgagtctgagttcgtccacgtggtggccatctccttcaccgcactgatcctgaccgagctgctgatggtggcgctgaccgtccgcacgtggcactggctgatggtggtggccgagttcctcagcttaggctgctacgtgtcctcactcgcttttctcaatgaatattttggtataggcagagtgtcttttggagctttcttagatgttgcctttatcaccaccgtgaccttcctgtggaaagtgtcggcgatcaccgtggtcagctgcctcccgctgtatgtcctcaagtacctgaggcgcaagtcttctcctcccagctactgcaagctggcctcctaaggggctgtgcacccccagcgggctggccccagcaccttctgcccttcccagcaccttgtgcccttgccagtgaacgcagggtttgccattgctaccaagcaagcaccacaagaaagggagggtacgccaggcgagcccagggcacagatgctgagacagcctctccttctcagtgcagggacgtcacccctgccaggcaagcccagggcacagatgccaggatggcttctccctctcagtgcgaggcttcacccctgccaggcaagcccagggcatagatgctgagacagcctctccctctcagtgcagggacgtcacccctgccaggcaagcccagggcacagaggccgggacggcctctccctctcagtgtgaggcttcacccatgctaggcaagcccagggcacagatgccgggatggcccctccctctcagtgcgggaacgtcacccctgccaggcaagcccagggcacagatgctgcgatggcctcttcctcttaagtgtggggcctcacccctgcttttctttctttttttgtattgtcaaaattgtatttccatattgaagcagcttgagtttctactgaaaatgagcccgaattatttcactattactgtaaagggttcatcttactctggcattctgagaattagactgaaagtttaatttctgcagttccctcatattcagattctttctttgatgttataacacaaagtcattcctactcaaatgtaataaaattgaggctccacggagaaaaaaaaaaaaaaaaaaaaaaaaaaaa

SEQ ID NO: 71 - protein, 1095 aa, Homo sapiens
MPLMMSEEGFENEESDYHTLPRARIMQRKRGLEWFVCDGWKFLCTSCCGWLINICRRKKELKARTVWLGCPEKCEEKHPRNSIKNQKYNVFTFIPGVLYEQFKFFLNLYFLVISCSQFVPALKIGYLYTYWAPLGFVLAVTMTREAIDEFRRFQRDKEVNSQLYSKLTVRGKVQVKSSDIQVGDLIIVEKNQRIPSDMVFLRTSEKAGSCFIRTDQLDGETDWKLKVAVSCTQQLPALGDLFSISAYVYAQKPQMDIHSFEGTFTREDSDPPIHESLSIENTLWASTIVASGTVIGVVIYTGKETRSVMNTSNPKNKVGLLDLELNRLTKALFLALVALSIVMVTLQGFVGPWYRNLFRFLLLFSYIIPISLRVNLDMGKAVYGWMMMKDENIPGTVVRTSTIPEELGRLVYLLTDKTGTLTQNEMIFKRLHLGTVSYGADTMDEIQSHVRDSYSQMQSQAGGNNTGSTPLRKAQSSAPKVRKSVSSRIHEAVKAIVLCHNVTPVYESRAGVTEETEFAEADQDFSDENRTYQASSPDEVALVQWTESVGLTLVSRDLTSMQLKTPSGQVLSFCILQLFPFTSESKRMGVIVRDESTAEITFYMKGADVAMSPIVQYNDWLEEECGNMAREGLRTLVVAKKALTEEQYQDFESRYTQAKLSMHDRSLKVAAVVESLEREMELLCLTGVEDQLQADVRPTLEMLRNAGIKIWMLTGDKLETATCIAKSSHLVSRTQDIHIFRQVTSRGEAHLELNAFRRKHDCALVISGDSLEVCLKYYEHEFVELACQCPAVVCCRCSPTQKARIVTLLQQHTGRRTCAIGDGGNDVSMIQAADCGIGIEGKEGKQASLAADFSITQFRHIGRLLMVHGRNSYKRSAALGQFVMHRGLIISTMQAVFSSVFYFASVPLYQGFLMVGYATIYTMFPVFSLVLDQDVKPEMAMLYPELYKDLTKGRSLSFKTFLIWVLISIYQGGILMYGALVLFESEFVHVVAISFTALILTELLMVALTVRTWHWLMVVAEFLSLGCYVSSLAFLNEYFGIGRVSFGAFLDVAFITTVTFLWKVSAITVVSCLPLYVLKYLRRKSSPPSYCKLAS

SEQ ID NO: 72 - DNA, 3255 bp, Homo sapiens; identical to SEQ ID NO: 69
  CDS (1)...(3255)

SEQ ID NO: 73 - protein, 464 aa, Escherichia coli
MPDAKKQGRSNKAMTFFVCFLAALAGLLFGLDIGVIAGALPFIADEFQITSHTQEWVVSSMMFGAAVGAVGSGWLSFKLGRKKSLMIGAILFVAGSLFSAAAPNVEVLILSRVLLGLAVGVASYTAPLYLSEIAPEKIRGSMISMYQLMITIGILGAYLSDTAFSYTGAWRWMLGVIIIPAILLLIGVFFLPDSPRWFAAKRRFVDAERVLLRLRDTSAEAKRELDEIRESLQVKQSGWALFKENSNFRRAVFLGVLLQVMQQFTGMNVIMYYAPKIFELAGYTNTTEQMWGTVIVGLTNVLATFIAIGLVDRWGRKPTLTLGFLVMAAGMGVLGTMMHIGIHSPSAQYFAIAMLLMFIVGFAMSAGPLIWVLCSEIQPLKGRDFGITCSTATNWIANMIVGATFLTMLNTLGNANTFWVYAALNVLFILLTLWLVPETKHVSLEHIERNLMKGRKLREIGAHD

SEQ ID NO: 74 - protein, 472 aa, Escherichia coli
MVTINTESALTPRSLRDTRRMNMFVSVAAAVAGLLFGLDIGVIAGALPFITDHFVLTSRLQEWVVSSMMLGAAIGALFNGWLSFRLGRKYSLMAGAILFVLGSIGSAFATSVEMLIAARVVLGIAVGIASYTAPLYLSEMASENVRGKMISMYQLMVTLGIVLAFLSDTAFSYSGNWRAMLGVLALPAVLLIILVVFLPNSPRWLAEKGRHIEAEEVLRMLRDTSEKAREELNEIRESLKLKQGGWALFKINRNVRRAVFLGMLLQAMQQFTGMNIIMYYAPRIFKMAGFTTTEQQMIATLVVGLTFMFATFIAVFTVDKAGRKPALKIGFSVMALGTLVLGYCLMQFDNGTASSGLSWLSVGMTMMCIAGYAMSAAPVVWILCSEIQPLKCRDFGITCSTTTNWVSNMIIGATFLTLLDSIGAAGTFWLYTALNIAFVGITFWLIPETKNVTLEHIERKLMAGEKLRNIGV

SEQ ID NO: 75 - protein, 526 aa, Homo sapiens
MTSDHEHMTAVCASHVQTHGSQLQIQKLSPCFRPPTPAFRISSSIILLGAGLAGPSTGDRWFGVSVVGTGLFLPPLQLLLPPRLLFTHAILERLHLWLALPPVLVLGHALLHCKVGGSTARAGDQLVQRVLLLIVFLHRWVQVWPZGTEVDILGMGSRTGGRRGPELRPGFRISILSAYISNYAFANVFHGWKYMFGLVIPLGVLQAIAMYFLPPSPRFLVMKGQEGAASKVLGRLRALSDTTEELTVIKSSLKDEYQYSFWDLFRSKDNMRTRIMIGLTLVFFVQITGQPNILFYASTVLKSVGFQSNEAASLASTGVGVVKVISTIPATLLVDHVGSKTFLCIGLLNAGLSHTEYQIVTDPGDVPAFLKWLSLASLLVYVAAFSIGLGPMPWLVLSEIFPGGIRGRAMALTSSMNWGINLLISLTFLTVNLIGLPWVCFIYTIMSLASLLFVVMFIPETKGCSLEQISMELAKVNYVKNNICFMSHHQEELVPKQPQKRKPQEQLLECNKLCGRGQSRQLSPET

SEQ ID NO: 76 - DNA, 25002 bp, Caenorhabditis elegans
accctgcaataggatatcattacgatgtaagtattcaatatttatttcaaatttgtattttgttgacaaattttcaaataatgaaatgtgaatgcttcatgaattcttaagctttcggggcacagaaagtgagggcgatcttcattttaactgcaaaatttcaggtaccatcatgtaatggttgtaaaacatttttccgtcgaacaattatcacgggaagaaaattcacatgtgctaaacaaaagaaatgtatggatggaacagaaccagttggtaagtttcttttaattttaagggtaatgtcttattttttcagatatgtcgaagcgtctttgccgagcttgtcgctttgcaaaatgtgtggaagttggaatgaatccaatggcaattcaagcagaagttaaaactgatgaaggcaaagttttaagaagtgaagtattgaatcaaagagaatcgctaggggttgtttcatctgtaagttgttttttttttaaaatacatctattaaatttcagttgatagtaaccgaggaagatttgttaagcagaatgattgaaaaattaacatttgtggaaagtaaggttgaaccattacatcgttctggaatgcctcctggttacagagtaagttaatgatttttttttaatttgcaagaactttaattgatttcaggacataagaaaattggaagaaattcttgattcaaaaccagtacttgttgttacggatattcccaatttgaaattctgcccttcaccatgtgcgaatgaaaaaaggtgagttttttattaaaatgagattgaaaattttcccacttctttagaccaagacgacatttcaccaactacgttcacacaagttacctggcttctcttgaatcttcaaaaatgtttgaattttcttcacaacttgatttggaatccagaattcttttaatgaaacacgcgacactaatttgttcgaatatgatgaatgcattcttttcgattaacgaaatgaaatcagatattcttaggcatccggatgggagcatgtcaggacatatgagaaaattcgatcgagagaatgatgtcatgacagatcatgtcaaattgatacagaagacattgatcactttcctaaatcataaagtcgacaaaattgaatatcttttattcaaagctattatgctttgcaatccaggtattttccttgccgtcatatatataatttaaacgattacttgaaatttcagctgtgcccggattagattcctggaaccaagaaatcatcgaaaaggaacgaaatcaatacgttaaagctcttctaaattattgtctccttcaacatggaaaacttcaaggcccaacaagattcgcaactattctcgcaatggctccaattatagagaatcaatcgaaaaatcaaaaagatttccatgtgtacattaaagcaaagcatttccagaagcacaaaaagatgggaacaacgttcagaaaatgtatcagttgcatgtttgatcaaattatggaaacataaataatcaatgtaaataaatgacaatgtttttgtttaactgttaatataatctgttcatcctctgtataatattctacctcaaaatacaaaaataaacatctcataatttattcccctaattcaaactacaaagcatgatggaaactctatacattagtcgtttgtcgtttcttgtggacgtttcatgtggtgctgaagttaggaatttgggcgatttacctacttgatgtaacttctaagtttaacctgacatttgcaattttaagaattttccaagcattataaaaaaaatagttcacacttttcatgtgcgagtagatgataattatgcaagttcaatcttgcacaggattaaacctactagttcacttctgatttttatatattaacttatcaatgtcttatttttgaagatttttcgtgtgacagaggtttcaaaaaaaagagatattcaatcagaattctaaaagacaggttgtgaaacttcaatattttcgaatataccgcacttgtagtgaattcagaatataattttcaatttaaaaaacacaatttttgaaggtacgcaccaatcacgcatctgaaaatttaagaaactacacatatatcagcaattgatcttcaaaattataacgacaaaactgaacttcaaactttcaaaaattccagaaattaaaacgactgaagtgattcttgcagagtgttgactcaaagtgaccaattggagaccatacttgttaattctttcaaaaacattttgatcgtcgcctgttacgtatacaaaagaagagtactgattcatcaaatttggaatataatcccacccacatgtaagtgtcgatagttgttgaatcggctgaaaactttttccgaaacagaaaggagaaagaacaaacatttgatagaggcgatagtcacatcattttccactctttttctctaccatcctatctctaatcagtctagtcttcactaaatcaaccgtttttatattccataaattgatccattaatgtcttcgaaggataggtagatatatttatcttgcgtttattttatttttccataatattccagtgattctccaccagaaacttttgaagtgtgcatctcctcaccagaaatacacaaaaaagaaataatgactccaccacagaaatcaaaaccaaaaagaaatcgacggaaaatttacaaaattcttccacaaaatcaatgtccatcggtgtgtcaaatttgtagaaatccagcaattggatatcattatgaggtaaactacagtatagtttgttttattgttagaagtagtgtaaaggttcactagagctactttaaagattacgattcgatgagttattcgatttactacatgaacgctaaactgagaatatgactttaaaaaatgttcaacttttcggttttgagaaaaatcaaaaggcggacacgaaacacgattccacaatttaagttttcaatactattctgccttggaaaatttatttggtagaaaagtctacatacaaacccaaaaatcagtataaaaattaagcactctaaaagagtctcacgttttaggtaccatcttgcaatggatgcaaaacattcttccgtcgtacaattatcactggccgtaaatttaaatgtttcaaagttagtaattgtcttgatggtaatgacgtaatcggtgagttcaataagagtcttaatgaaatttttttttgatatttgcgtttttgatttctgccttttgatcggaaacacatttccattcaaattttacacacattttccagatacatcgaagcgtgtttgtcgagcatgtcgatttgaaaaatgtgtacaagcgggaatgaatccaatggcaattcaagcagaagcaaagactgatgaaggagaagaacttaagaaattgatcgctaaaaagtttgaaaacggagaaaaattaaatgatggaaccgtattttttaatgtacatgacagattgaatcaaatacttggaaagttgataaaaattgaaacaaaattggaaaaagttcatgataatggaatgccaatgggatttttggatcaaagagatttaagcactgcgctctcttcaaaagttatctataacaatatggaaataccgtcaatgagctatactcctgttaaaatttcaaaaaacaccggattgtgagtttttttcaaaagaaaattccaaaaatttcaaaaaattctgaagtaatgtttaaatcgttttatgagcattgaagcttgcctgattggccaaaaataaacaaaaagctccaggcaactgtaaaaataaataaataaagattataattgacaaacagtatttttacaaattgttgaaaaataagttctgtgcgttttcaggccaaaacgaaggagtcgaaactttgttcattcaagttgtcttgcatctatcgaatattccaaaacatttgacttttcaagtgcaattgacatttcaagtaaagtacgtttttggaacagattttatctgaacaatgaccttattcgattatcttttgagattatagactagcaccatttttgcaagtattcaaaattaatattagacttatttcagataattctccttaaaaatactgcactatcttgtgcaaacttgacaaatgcttatacaacattcagaaagctgaaatcagatacacttttatacccagatggtagtatttatgggccaccacgacggaaaaatggtcctttgattgaaaaacaacgatcatttttacaaaatacgttgatatcatttatgactaacaatgttgataaaactgaatatattttactaaaagcaatagtactatgtaatccaggtatgtcataagtaccaaataattaattttcaaataaatattacagcaataatcgatctaccttatgccgattcaaaacatattcaaagagagcgagaggtttacgctcagtgtttgttccgatattgtctactacaacatggtacattacacgggcctgcaaggttttctgctttattatcaatattcaatgtgttggaaaatcaacagaaggaacaaaaggattactatttatacatcaaacttatacatagtcaaaaacacaaggatcctgaggttttaaagaagaaatgtattagtgtaatttatgatcagattatggattagaaaaagaaatctaatatgatagtgaataaatagattgatgaataaaaataattttgaaatgtacatgtttacatttttatttgagtacaatttgtttcttgaaaccatattaaccatgaagtccatcaattttatcttacaaaataaaccactccgacttgaaaattaagtgtggaatttgccagtacttcagcttcctttaaaaaaaaattcaaaatgtttaattcttttcccaattttctatgcggtatttcagaacttcaaactattgggaacattttgagacaacccccacagcttaaaagttttcaaaattgtttctccgataaaatgcacatatacctaacttttgaatataacccattttctctctgagttttatcgtgatttctgtgacgaaacactgaatgcgtactgcttttatcccgatttttcattgatctccattaaaaacatcacagttttgttgttattatctggtttacaaagagtcatattcagctgtacatacaagggatctaatcgcaacacattatgtgcacacgagctttgtatcgcaaacaatacatcgcggctaaaaattttcgttttctctactttctcattcatttatacttcatgcaacgtgtgtagatgagggaagtcagacgcagacggtacgtagactccaaagaaacaaagatgcgttgatcggtgcagacgccagtcctctctctaccgttctatggtttctgcgattttattattccaccttttgtgaagttcgatcactttacttttcttgcttcaatatcagaaagatgcttcctgactttattacagtaccatcaacaagtgaaaagtatgtttaatctccagaattgttttgtttgcatagatgatgggaaatcaataaccttctgttcatgtgacgcgcggtatcatatttctcttcttttttcagatgtctttctccggaattgttgctaccaaatatggatgagaacttggaagattcaaaaccaagcgtgagtttttcctattcggaaaaatatactttctaaaaaaatatttaaaaacaatcaaaaagttaaagtattaattatatatctcaaaacgatatatctcaaaaacgttatattcgaatttcagtctttaaaatatcaaaaggcgatgatgagccgaggaacatgtccatcaaattgtaaagtctgtaggcactcagctactggatatcactatgatgttccatcttgtaatggatgcaaaacattttttcgacgatcaattctggatggaagaaaatatacatgcctgaagatgagaaaatgtttgagtggaactgaacctgttggtatgctttaattttctcactaattcaagatttcactatccctatcatatacttcaaaccatttcagacttgtctaggcgcatgtgtcgagcatgccgatttgagaaatgtgtagaagctggaatgaatccatctgcaatacaagccgacatgaaaaccactgacggtgagctgttgagaaaagaaattatgataaagcagaagacagccgttgattttttgaatactccacaggtatattacaaaaataattgcaacaatgataatcactgattatttcaggttattatgagttttgaagataaagtgcaaggaataattggcaagctgacagtaatggaattgaagatagaaccattgtatacaggaggattgcctccaggcaatagagtatgatgcttttcctgtaaactggtaactttataattcaggatatcaggaaattggacgagttgattgatgctccactgattctcagctatgacgaaattccaaatttaaagtattgtccgagtgtagacgaattgaccggagagtgagtttttattcagaaaaatcaatgattccataaaattatttttcagaataaagcccagtggagcttgctacatacattgcggctacctagctagtatagaatattcaaaaatgtttgactttgctcataaaatagatgttgctagcaaagcaactctgataaaacatgcaacaattatgtgcgcagatatcatgacagctttcttctcttactatcaacgtaaatccgatcgactgattcatccaaatggaatgtttgcaggaccaccaaaatacaggtgaaacacttcagtaaatatgtttttgaaaaatgattttgcttgagatatggtgaagccggtacaaaatatcaagcttcaatgcaaagaactctggcaacagtgctccgacatgaacttaatcgaattgaatatatgctactcaaagctattgtgctttgcaatccaggtatgaccaaaaattttgaatcaaaaacacaaaaacatcaatttcaatacaggagtccatgaaaataatatcttttaataacacgatttgatttccagcagtctctagtctttctatttcggtacaacaaataattggaaaagaacgtgaagaatatgttcgaactctacttacatactgtcttctcaattatggttctgttcatggaccatcaagattttctgcccttcttgctattatgtcagttcttgaaagtcaacagaagaatgcaaaggactttcatttattggctaaagcgacaatactgaaagatgcagttagatacacacgaattagcaatctttacgaacaaatcatggagtcgtaaagattagaaattgttgaaattaggatatttgggtactcgaagtctttatttttattactttcaatttatgttatatttctatttatatatacatttgagaaatacaaagaaatcagagaaaatcatcagaattgttgcattggttctagcgggtattgtaaataaaatgttatttttccgtttcgaatcttctctacataaagcttttcgatcagcacataaagtgagaatagaagtttggattaaattacaacctgaatccgttatccgcaatcagtttaaccgcatcgtaaagacaatcagcagtgagatcaggagtcacgggcatcttttcgaaatctggtctccatttaccagttctcacttgaacacctcgcattccacaagcttgagcaccgcctacgtccgacatcaaatcgtcgccaaccattacaatctggaaattagaaaatgaagtcacaaagattttgttccaacataagaatggaaattgaaattccgatgtataattgttttacttacttcttctggtttcatacccaatgcattcattccttgctcgaaatagaaccggcttggttttccaatgttcaaaacctcacaattagttgagaacttgagagcagcagcaaaagcgccgacatcaatgcacggaccatcaactcgttggaagaactttctaaaatagaaaagggaaatgtgttagagagaacaggaaacaattattacccattgcccattgttatgagaagcggtttaggcatgtcgatgagaattcggaaagctctgttgattcgatcgaatgagaaaccttcttcaacttcacccatcacaacacaattcggagatgaggtgtcgattccatcgaagtattcaagcacatcttgagaggaaaaagaactgattgttgtcagagaattaaagaatcaaataccgtctctgacaaacagatgtgggcgaagcttgttctctcgacaatattgtgcaaccactggagctggagttatgacgtcttcctctcgaacactgaaaataaaaactattataattccaataagtagtgggtgatttgaaagctgcctatttgacattattaatttttacattattcggtaacactttttttctaaatttgttctatcagacttcagtaggacattttggtggtttttgaattgatgactgatcaacagaaatattttctgaatctcaaaaaatcaatggctgggagagtgaaattttttttctgatttcttccatcggaaaacatgcaaaaattgggtaaaatttgatttctacaaaaaccgtgaaataactctcaaacttacttgattccgagtctttgaagtctccgagcaacatttctgtttgaatttccttttgcattgctaagaaattttaccttcgagtgttgatacaaactgtaaatattttcaatattatgtatctatttttgcattttacaatatttttcttatctaatgcaccgttgttctaggtgcacatgcacgcaaatgtttaccttgagggcattttttataaacagttttccaaaaatttgtggaaattttttcggattgagaacaaaatacaggacatgtaaaacgatttgacataaaagtgataaacttgaaaaatgaggatacatgatttgtatctaccatttttattaacaaaaaagagttgaagtttttattagctagaaaaatcattaaaaaacttacaaattaaccgcttcagctgattttggaacagcaactccatcggatttataaatactattatacaaaactcccgttatatcgagcaggaacccattaaccgctcttccatttgacattcttcgaccctaaagtttcaatatgaaatttcataatcctgaaaccaagaccaaagttcaggaaaccagcaaaagctataacatagaacaaaaacagaaaagatagaatgaaaatcttgagatagctatggaaaaggaagagaggaaagggtctttctctctttctttccatgcgggggcaatatgggcagaaagggtccgtttagatgttcttctctctgctcactgcatgtgcacccagtacgtcttcttcacttctctcaccctcttcactcctttcttgttccactatctcttcaatacacatgtccagctgcctattggaccttctgttttcaaggtgttgtcacaacttttgagctatgaaactactttgatgctaattagatatgatttagtaatatgtattttgtttcatagctcacacagaaaatgtatatcatgagaaacatcagagagatttagcaatggatccgtaatgtatctttaatgaactcaagatattcatattttaaaacgtgtttacactcaaaataaatgaatattgtaagaaaacactgaatcgcatacccaaaagcctccaaactttcaaaagatgtagagtaaccatacaaaacaataggaagagttcgaaatgtgcagtcacgcgcgcatttcttgtgtctctaaggtgtgaattacgcaaacacagagacggcagattgcggtatgtcggtcgagaatgatgaattacgatcaagacaagaaaagaagaagaagaaggaaagacgaaccagagattttcgactgcagtagctgaggaacaattgtagaagaatactcggcgtcactttataaataaatgaaacaaaatcttgattaaaagagaagctagaaggtcacgttaatactatgaggttatgcacttgaaattatgcaatatttcaaatggcacagaaaaaaccaacaggtaataaaatcaatcaagtctgaaaatgttgctctagaaatgtgtatcgtacaatgaagcgtgtatctctgaatcaaaaacgtttagactgtgacaattctttccggaatccaataagaacaaagtgtggaaaagggatgcaccgagctgaaaatttattgaactgtagtttgaggaactcaatcaagacgaaccaaacatcattcatgcgaagaaacatcatttaattttagaaactataaaaaaaaggttaaaacatttaactggcattcagagacaattcttaaaactttgatggcgcaaaacaacaagacgtcatccacagaagaaactgtgccctacatcttcaaatagatcggacatcatctatctacaagtattctttctttttcattctcttgtccctctccatcagccctccttgatagtcttttttcacattctcaccttcttttttgctgtctatttacttttatgattgccgcaccaataaatatctctactcactttcaaactccttatcgatttaatccatatgtactatacttttaaagacagattatgcgtgaggcgaatgtgacatagtctagaattccggaaattgtgcgcaaaattcttagaaacatatgtagttgagtcgcatttttcgaatccagtttttatttcagcggctgttttatttcagcggctgttttatgactgcatttttacaagctgctaattgcgaatttccacgataacggtttggttggcacgtgtttcccaataaatttgtaagcattttacataatgcaccaatttttccctccacacatcatttccgaatttgatttttttttcttaaattacttgaacatattatcgaaaaaaattgaaactgttcccatatctacaaaacatcattcaatagtattagattcagaaaactgcctacaaattgattttttaaccattggttttcatgaactatctttcaacaattcagatgaactttttttaaaattcaaagtgctattatgttattacaattagaagaaattaaaaattcaaattatacaatttaagtttggctctatcacgggttttaaatgaatttcttgaaaacgcgcggcaaaagcttagcaaactgtctattgaacttacccttactattaatcattgaaattttcaaatgcgtatatttaaaaaaacagaacggtatggattctcatgataagacagttccttaatatctcgtagcaaaaaaatcgacccatctctttgccccttgcttcatttctgccgctttcttcgtgccaggaaggtaggcattctcgtgaaccgacggtctgagtttgagtgttttcctcttaaaatgttcgattattataggtcgccagacataaatattatttgttaatatttcatggtgtcgaaaccacaatcttttttctttctacaggtggtttaatattcgtttcctttgtaaattttcccatcggcaggaattggcataacctgattttttacagtagaaacacatatctagaagattaagatcttcaattgtccatctcgttttaaactgtcatttctccggttctttttggtttttggtggccttttaccggttttgttacgttttcccgaaatgatataaatttttgagcttgtcacttaatttatcaagcggcgaccaaagacaaatacacaccgcagaagaaaagtttgtaaagagaaatggaagttgactatatgtacatatataaaatggaatgaatagtcgcatcacattgacggtgaaagtacatgcggtgatgccttcgaggacatacggacacactttccttctccaatttcatcgattaatttgtattgttatattctgaattccaggttttcaagacgaacattgtgaatcattttcatcacattgttctggtacaaataaaatgtatttccaagttttcccgcacatttacatttttgcttcactacgtgtttagcacgttatgcgataagaggagaagtggctgtaaaatggtttcgcactcccttttttctctcccacaatcattgcacggtttctatgaccttttcgaactacattccttcttttttcatttggaggtttgatactgatatagtttgtagggtacccgcttattgtaactctaactgttatatccattgtcattgattcatttatctggggggtattcccttctatttggcgaagtctacatttctcgtaaactgtacaaaataacgtttaaaagttctttgaatactgaaaataataaaacggtttgaacaatccaacttattttccaattttcaaaaactagccgatcatttttgtgaaataaaactattttctgcttagtatcgaataaaacatcttaacggtaaaaatgagttttttaaaacacttcttttaaaccttttttggatttatttgaattttggctttgaaatagtctttattccggaaatttcatataatctcaagggcaaatacattttgaaccgtgttcaaagttatttaaaaatgcatttcgtttgaatcactgagatttccaaaaattcaatgagtcataatacatggagcaacaaatctataagaatgtccacttgcttttgttgttcttttgttttcaaacgttttggatataggctgttattttggccgacaacaacttcagaatgtattttatgtttgagttttaaatgtgttactgaaaacaaataaaatgacagattaatatatctcttggtaaaaattaattaattttgttactactttctgttcctgaaaagcctgaaaaatcagaccattttttgcagtgtctttgttaatgataaaaaccgacatgcacactgaccatcaaaccgattattatgaattaataatttaatccgacagtttcctgtttctgttcatttcatctcacgaatgcttcaattttcattttttttttccgtgtctcttaatacgtttaatttattacgagttcaagtaacaacgtttcaatgaactctcatttagtttgaaaattaaaatatttaagttctaacattttgaagagtgaacgatggtgagaaacaaagtggcaccagttgaagatggagccaatattcaaagaaacttcgagcctccgccaccatatacaactccaacggattcacctgaagacaagattcgatcaaattcaactgcaacaaccgcatctcaaccagaatttcaaggatgttggactattgttgtagttgccattttattcatcatcaatcttctcaattatatggatcggtatacgattgcaggttagttgacagtaactattttacctccttggtacaatattcaaaacacaattcatgtaaccatgtgacagttttccgtgcaataaaatttagtagagcctccaaaactataaacaacaaaaggtagaaagatgaaaatggccggaaaacgacatgagagagtatcttgtttgaacttgtcatcattagaagataagaatttacgtaatgggtgagtacaataactatgggacaaacatcattttttgatctaaacggagcattaaaaaatatgtgcatgtcaaatttgaattagtatgtgtggaacttttcctactgcaataatataacgttttcaacaaaaaaaacattaaaaacattattcgtagaggaaattagcatttaaaaaccaataaaatttttaggagtccttaatgatgtacaaacctactacaatattagtgatgcttgggctggactgattcaaacaacgttcatggtgttcttcattattttctctccaatttgcggtttcctaggagatcgttacaatcgaaaatggatttttgttgttggaattgcgatttgggtgtctgcagtgtttgcttccacttttattccatctaatgtgagtttttgactctaatcatactatttcttcaatcaacttcattttcagcaattctggttgttccttttattccgcggaattgttggaatcggagaagcatcttatgcaattatctccccaactgttattgctgatatgttcactggagtgctccgttccagaatgcttatggtcttctactttgcgattccctttggatgtggtctgggatttgtagttggatctgctgtggctagttggacaggacattggcaatggggagtacgagtgactggagttctcggaatcgtttgtctcttgcttattatcgtgtttgttagagaaccagaacgtggaaaagctgaacgtgaaaagggagaaattgctgcatctacagaagcaacaagttatttggatgatatgaaggatttgctttcaaagtgagtttctttcaattttatttaaaaagcaacctttcatatttcagtgcaacatatgtgacaagcagtctcggttatactgcaactgttttcatggtcggaactctcgcttggtgggctccaattacaattcaatatgcagattctgctagaaggaacggaacaattacagaagatcagaaagcaaacattaacttggtattcggtgcactcacttgtgttggtggcgttcttggtgttgctattggtacattggtttcaaatgtaaatattgtcgttgaagattagaaaaatatacatcttttttttagatgtggtctcgtggagttggtccttttaagcacattcaaacagttcgtgcagatgctcttgtctgtgctatcggagcagcaatttgcattccaacactcattcttgctattcaaaacattgagagcaacatgaattttgcttgggtgtgtaaaatttggactatgaaacatttcaaattcgcttttttttagggaatgttatttatttgcattgtcgccagtagttttaactgggctacaaatgtcgatctgttactggtaagtttcactcgatattgaaacaaattcccaaataaatgttttttgcagagtgtggtagttcctcagagaagaagttcagcctcatcatggcaaattttaatttctcatatgtttggagatgcttctggtccttacattctgggattgatatcagatgcaatcagaggcaatgaagatacggcacaggctcattataaatcattggtcacctcattttggttgtgtgttggaactttggtgttgtcagttattctatttggaatatcagcaataacagttgtaaaagataaagccagattcaacgaaattatgtgtaagtttcagactttttatagcttggcactgaatcaaaatattcatttgcagtggcacaagctaacaaggacaacacatcaagcgggacacttccaattgaagacagaaacacagaagacgaaactggttccgaagttcaacatatgtaattctaatattttagtaaagctggttgctcaacccctcttcccctacatattacatttttctcacagtttattgcgggtctgctcttttttttgtatttttgtatcccccatcagtcaatcattcgcataaattttgcgtttttattgccaaatcttttgtacatttcggaatattcgtgctgtcagagaaaatcaatgatagcagttaacgtgattctttatgcttttcatagtgtttttgaaaaatatgaaaacaagtttctacttggaacttttttatggagcctccttgttgtgtggcggacaaatgacaacagaagctgggtaaaaagtaagttttattcaaaacatactatacttcgccttcccacctctcgcccggaaatgttttcggaaaagtatagtaaaggtcagttgaagtgttaacatggtaacaaaaatggcatacaaaactaccggtcaggcgcgaggaggcgaataaagaggcgagcatgaatcaccaatgtggaacgccgttattttggtttattgtagaaatattactttcgaacaaaatcgtgacgccaaacaaaaataacttttgcgttagcttgcagtttcaatttttaaaattttccatggttgtccaaatttctgcatagcaaagtacttgtcacgtttttcaacataagaacagttttcagaaaccaactttgattcatttttcatttacataatttcagatacaattgaaatctgcaatattgtaagattcatatcagttccattatttcattcatctccagttaattggctttatttatttactacatcttcagcattttcttttattgctcaaagttggtttctaaaaaatcaaaagtttttaaactgaccaattcagaaaaagaatttactggattcacattaatgatcgctcttcatttgattcaatattttctcatcacaggattaagtgcaatgacatattggaatttaggaaaacaattatttaatttatttgtttggccagatgattctcgtcaactaatcattcagttggcaatgattttgtctactgcaactatgttctgtcacgtatttatcagtatttggtcaaagctttcagagattatcaatataagtttgttttttttacattgtttctctgaaacagtattatatattttgccttcagattggtttctagtttctaccatcgttcatcctgctattagtttctacatctttccgagatttcaacatgttcatatgttgactgtttggttttcttttcttatgatttcagttaaatttaatcagaagatgttcattaaagttctcggagtctttttcattgttctatactccagccttttggaatcctgggaattatattttttggatttgaagtcacttttcaaaataaaatatttattctaacaagtgtttacgtagtaagcattaacttaaatatggtgaaatggaaaatatggtgcttaaaaaacatcaaaatgaacacagactaccgaatttgataatgacacttcggtaatccttctcaaaaatttttattactgttttaaatgttagaataaaaggctcaaaaacaaacctccaactattagcagccggaagaagtaattaaattgaaacaaatttagggccgctgcaagccttttctttataaattttgaacaattataaattcagtctttgaaagccaatttgagttttattaagcagtatatatttttagatagtcggcatttgaatctatcaacaattttaatcatcatcatcatgtttatcatcaacagtacctccactgtttcgtacaatatcatcatatcgtaaataagttcttctgtcagcatttgatggacctggacgaacacaatccgcatatcgaagacgatgaaatcttgtagcataggttggaggatctctgaaattgttccaattttcttccagtgttattccgaaagaatcgtaccggtaatgtaaaatccatttctcaaaaattccttcaaaacaagcttcagtgtcagaatttagaagaagtatctgaatcaaacaaacctaatcagatgaaactttaaacttcatacccaattaacacaccaagattggcttaaactgaatccaggccaccagaatagtcccatattgacaatatcggattgtttaaagaaaatcttgaaatgatcacgagatccttgttcaaaatcgtttcttcctgggttatcgagatgaaaagtttcagaatcatgtccagattcatagaatactttcaaatatgatgcggcgtctgttccagcaccatctttgtcacaagtctctatgactacatcccagagacgaccgtcatctacaaaactgaataattgccacttatttgaatttgaatacaacaattttcagaaaagttttattatgattgttgttcatttcagcattgtatgcgtgattttaaacgattttcttgattgacacattagttgaactcaaagttaagattaaaaataatattaaactacatcattgttcacaacttcctggaaagttttagtgaggttcatattcgaatattctcttcaaccccatttttaaaagttgacttgtgttttaattgtttaccctttctgatcatttctatcattgaaattggaagtcatttcacttttcttcccacagctcatagttacaaaaacaagagtgactgaaatttcaaaaactacttgtggtttcagtttttattttattttatgaatccagttagtcgaaaaaaaaacaatcaaattaattccatgcaacccaaaatattttaaagttcttggtatttatgcagtttttaaaactgagaatcaaaagttaaaataattgttttaaacttacgatgaacaacagtttcattagttggagaaaattgtgcaaaaacgatagtaactagtaagcagtatattaaaaatgagtggaacattttggggagttggtgaaaaaattataggaagagatgaaagacactttgtgttctggaatcttctcctgacgacaactaaaaatccatcagcaattgaaatgatcgattgatgattgatggatgagtgtgatcatatgcttgctcaaaatactttcaaagcgaaaaaaaaacacaagggaaacatgagttctaaatttttgatcggaacagatggtagaaattgaaatgtttggattcgtcatcggtaaaatgaatataaacatttattagtgcaaataaacaatcaaaatttaatattaaacaagatgaaaaatatgacctgattttttgaaattattctggttgtgaaaaaatatttgtatgattatacaaatcgaaatagttcaaactctcaaaatgatgtctctccggaatctcgtgtattttcacgagtttcagttctttcaaaaaacgtgccaaatattttcttataaaacaaatagtctttgactaaatcaaagattaccgtgatatgagatcttaaaagtagcattggttataagctattaatatgattaatacgagatactgtaattgtagatttagtttagcttcatatatctctaatttaactttttaagcctcgagttaagtattttacatttgaacaattgtgtaatcaaaacgcaatcctgtacataattattttcagcgctgtattttctctcatcaatcaaaaaatttaatttttaaaaataatttgatttaccgagcatctgaacagaagcaaggacacgtgagtttgctgattttgctgataagaaatcaattatttaggtgcattggtgatcttcattctttttctaaacttatcagaaaaaatatattctctatttttaacatttattgtgttctacatgttctacatggttttgtatattcgtaacaattttttaagtagaaaaaaatatatactgataatcagcaaaaactagtttttgttcacattttgatatcatcacttttttattatattcaactagagtttaaaatattaattttattgattcttatcgatatttttgactattgattcccgtgttgatcgctttgtgataataaaatttttggaacaaattagccaatcgtgcattttttgtcatcaattcaatattatctgacgattcctgttcctgttagttgcaaaatcatgaacaagtatcacttttcctatattttatttcatatttttcccgtcatgaaacgttatgttttgcctcatataaatacaaaaatgaacaaaaaagtggtgttcgacttgaaaacaagatttttaggacagaaggtcggatgggaaaaggttttcgttcgacggacatcacacaaaaaagtatcacaccgcacctcattctatttactttgttgatagaatggaaaaacattcgactgaaaatgaatacagagtaagtttatttttccaaaaatgtttgaaataatgattcaatttttaggtgtataaggaacgatggtttattcttttggcgactactgcattgatttgctcaaatattatggtgagtaatggaatattggtattttcatatttagattggcgtgaattttgctaagaagtccgatgtttttccaaaattcaaatacattacaaagtagtgccaaaattaaacattttttagattttttgttttagctgaaaagtttgacgaggtgttcataaatttaaagagtttttgaaaacaaacctttaattatgatgttcctgcatttcttacaatttttgaggtaatttaatagaagacgagcctgccacaaaacggttttaccagatttttcaaactttaacaattatttactggatttaaaataaaacatattaatgttttttctgcagcaatgggtgagtttctcggctcaaatcgaccaaacaaatatgtttttctgtggcccaaatgaatataagaattgttcagcagccttcctatctaatcaaatctatcaggttagatttttcaattttgatcggtataatttattatattatttttagatagttgcagtaattgtgagcattataggaatgtattttgcaacagtttttggaacacttccaactgtatgtttcttcttctaatttacagttttctaatttacacgtcttctagctccgtctctcagcagttttcaatattgttggtgcagcaatccgactcattgcgtcacttccaagccttcaaaactttttctggagacagtttttaatgattattggaactagcattgccgcggctgctcaaatgtatttcgtcgtcttctcgaaaattgcggaaagttggttttatccaagacatcgagcttctgcaaatgttgcatgttcaaatagtcttgagttaggagttgtacttggaactgttttaccatcaattattgtaccagcttcttttacaaaagacattgtcagttcctggacattttttcttttggttagttatgtctctgtcatgattaaacaactatattacaatttcagaattcaataatagcagttgtatgtataattccattatttttattatttgttctatgccgtcgatcggttccaaaaacgccaccatcagcctcatcgcaacatgagtcaagtggtcctgtgacatctggtatttttaaatgtttaaagtaagcccgtacttagctgtttaattttaattcttctgatagttctcagggatcgtcagtttctcattcaaatattcgtttattcaattaattttgcaattgcaaatggcctcatttatacttctaatgccatcaactatagaggttataatttgaaagggtacgtctagtaaggttttctgctaggtacaagaaatcctactctgtcaagtaggcaggcatttttagacctgcctaggaggtttaaactcaagacagccctttgcgtataattattttgttcaggtatccaatagcaatcgccacgatggtctgcatgttttcagcctatttcgtaggagtaattgcagatagaacaagaaagttcaaagttagtttcaaaaaatctaatcttatctgatatccatttttctagttgatcgcaataataaacgcacttgttgtagccgtttgtgtactggtacttcgtctggtaaggctttttcaaaataacattaaatttattcattaatgcttttagtatttaataaaaacttatacgggatggtatgattcagtaattgtttgtacacttttaagcattatcagtaagttattttaattttgcttatttagaatatattttcaaaaattcagtgtcctgttgtgctatacatacaccgattggaaatgagatgggagttgagacaacttacccagttcaagaatcaatttctacaggagttttgaatactttcgggtgagcctttggttctttttacggcgaaaaaaagtgtgatatacccgcttttttgggtctcgcagcgaatttgtatttcggtttgtgcttttctgatattaattttatacgagttttattcaaaacgaaacgttaaaaagtttttcagtcaagcttggttattctgcttatattttattatgtattctttacaagaatcaaattgggtttacaagaacaaccgtaaaggaggaagctgggaatgtaagtttctttttaaattttaaaacaatgtttcaactaacgcggtcacttacaagcctgtgtagctttagtttctaactaattttcaaataattaaaagttttttttctaatagtaaataaaaatataaatattacgggaacactaaatactgaaagtgcgtattgcacaacatatttgacgcgaaaaatgatttgtagcgtagcgaaaactacagcaactttttagatgactaccgtagaactggtttacggaactcgtgtttcaatcgataaaatattaaaagaaaacacaaaaatgacaaaacaataaaaaaaaaactttaaaaaaaattgaatattgttgtcacaattcgcacaaatacttgtttcgtaactagagccccacggcccgagaagtggtacctgtacgcaatttgtctaccgtacacctggacgtttgggcgcgtttttctcaaaaacggctggtccagtttttttgtgatgcatataaaaaatgttcgaaattaaattcaaaattttttggaccaaagctttttccttaaaacgagcccaaacctggctaaactgcaattatcaatagagcgcgtttacactgatgtaccctttgccgggctgtgagcccgtaaaccgacaccagcactaagtacagaagtcattaaaataattgttttaatgttcgctacgatatatttccgggtcaaatatgttgcgcaatacgcattttcaaaacgtagtgttcctgttaattatgttttcatttctgcttcaaaaactaaatattttatattacagtagcccttgacttctgggcaggaatgtctattctaaactttattgtggctgtaatattcttgagaccccgatataaccgtttacaaatggaagaagaagctcaaaatacacgggaagcaattcgagattcagtgtatacaatttgtaagtaatgaactgcttttatttatcaatgatgtaaataataaaaaaatgaatttgctgaaaaaaataaagtcatgagaaacaggaaatgcgatatgagacaatggtgaaaaaagattgggactagttgaaactgggtgcaaatgaactggtgaagtctagaaacataatataaacatgtttgttgggcaaaataatttcaaattgagactatggtacatatgattttttaagtgagaaaatacaattcctctaacttcttaagtacaaaatgctataaaatgcaaagtaaatgcttgctactatcgcatttcgatatccgacgcagccgttcgagctgtaacaggttcctcattttctaatgccaatttggcattttccagttctagacgacgatatctgtaattgataaaattatttattgagttttgataaacgtttataccgtggtctcaaaaagaacagtgataagatgacagatacaattgagagcccacatgttacatcgagagcaactgaaaaatattcatttacttctattttgaagatgataaaacttacatttccaagattgtgcatagaacaagtgcaacttttctgtgtaattttgtgcaaatggaataatgaacatgaaaagcgatccgaatataacaagaacacctgatgacgttgcttccattactgggaatgtcgtctcaacaccaagttccactccaatcgggaattgaggtattgaaaaggcacctgaagaaatataggaattttgttatacaattaaatttaaaaaatccttaccgagacatccacaaagagtgtaaacgattatgctatcaaagagcccagtccgtggttgatttaggaactgcaagtgtagcctttttagattaaaaaaatccatagaggaaatttagacatattgacacaatttttttcgaagaccctggtagaagaattttaactcaccattctcaatgtaatgactgaacatgaaaatccaacagtacaaactctgattatttcctaaattttaaaattatattttctttttctgattcataccgaccactcaccttgaacttgcgtgttttgtcggcaatatgaccagcgagcagtgatgttaacgtgccaacgattgcacacacggcagttggatatctgaaaaataaatgaattactcatatgcttctagaactctgcaaagttgttacccagccatctcataaccttgatctttgagtggaccatcgaggaaaatcattagactccacagaagcgaaaacgcaaatgcaaagagagtcatttggatgaaaaattgagcattactgaaattaaagtatttaaagtttttggcgtgatactaaaaacctacaaaatacattgaagaatagatttaaagaaaccaatgttgttctgatgagcagcagaagaagctgatggtggagtgggtggcagtttagttcgaacgaatagtgctagaacaaatgggaacaaggctagacattccattccaagagtctgaaaatatgaattgtcaatgataattaaattgagtactaacaaatgtgaagaacatccaactattcgaatcaatagtcttattgtgaccaaaaagaatggatggcacaattgttccgagggcaacaccggcaggatttgctgaaattgataggaattacttacgaacattaaaattccactaaccaacaaaagaaagtacatttgcaattgctctctgatcaccagggaaccagcattcagcaatttttgatggaagaactaaaaagaatgcttgtgctgaagcagcgataaacgatcctgcatgaagaagacattcacgaacaaaatgtgattttatgaaaggaatcgaggcaatcatccgaatcgatgctccaattacatttaaagttgtaccaagaagacc

SEQ ID NO: 77 - protein, 1237 aa, Rattus norvegicus
MARAKLPRSPSEGKAGPGDTPAGSAAPEEPHGLSPLLPTRGGGSVGSDVGQRLHVEDFSLDSSLSQVQVEFYVNENTFKERLKLFFIKNQRSSLRIRLFNFSLKLLTCLLYIVRVLLDNPDQGIGCWGCTKYNYTFNGSSSEFHWAPILWVERKMALWVIQVIVATISFLETMLLIYLSYKGNIWEQIFHVSFVLEMINTLPFIITVFWPPLRNLFIPVFLNCWLAKHALENMINDFHRAILRTQSAMFNQVLILFCTLLCLVFTGTCGIQHLERAGGNLNLLTSFYFCIVTFSTVGFGDVTPKIWPSQLLVVILICVTLVVLPLQFEELVYLWMERQKSGGNYSRHRARTEKHVVLCVSSLKIDLLMDFLNEFYAHPRLQDYYVVILCPSEMDVQVRRVLQIPLWSQRVIYLQGSALKDQDLMRAKMDNGEACFILSSRNEVDRTAADHQTILRAWAVKDFAPNCPLYVQILKPENKFHVKFADHVVCEEECKYAMLALNCICPATSTLITLLVHTSRGQEGQESPEQWQRMYGRCSGNEVYHIRMGDSKFFREYEGKSFTYAAFHAHKKYGVCLIGLKREENKSILLNPGPRHILAASDTCFYINITKEENSAFIFKQEEKQNRRGLAGQALYEGPSRLPVHSIIASMVAMDLQNTDCRPSQGGSGGGGGKLTLPTENGSGSRRPSIAPVLELADSSALLPCDLLSDQSEDEVTPSDDEGLSVVEYVKGYPPNSPYIGSSPTLCHLLPVKAPFCCLRLDKGCKHNSYEDAKAYGFKNKLIIVSAETAGNGLYNFIVPLRAYYRSRRELNPIVLLLDNKPDHHFLEAICCFPMVYYMEGSVDNLDSLLQCGIIYADNLVVVDKESTMSAEEDYMADAKTIVNVQTMFRLFPSLSITTELTHPSNMRFMQFRAKDSYSLALSKLEKQERENGSNLAFMFRLPFAAGRVFSISMLDTLLYQSFVKDYMITITRLLLGLDTTPGSGYLCAMKVTEDDLWIRTYGRLFQKLCSSSAEIPIGIYRTECHVFSSEPHDLRAQSQISVNMEDCEDTREAKGPWGTRAASGGGSTHGRHGGSADPVEHPLLRRKSLQWARKLSRKSSKQAGKAPMTTDWITQQRLSLYRRSERQELSELVKNRMKHLGLPTTGYEDVANLTASDVMNRVNLGYLQDEMNDHHQNTLSYVLINPPPDTRLEPNDIVYLIRSDPLAHVTSSSQSRKSSCSNKLSSCNPETRDETQL

SEQ ID NO: 78 - protein, 638 aa, Rattus norvegicus
MGKIENNERVILNVGGTRHETYRSTLKTLPGTRLALLASSEPQGDCLTAAGDKLQPLPPPLSPPPRPPPLSPVPSGCFEGGAGNCSSHGGNGSDHPGGGREFFFDRHPGVFAYVLNYYRTGKLHCPADVCGPLFEEELAFWGIDETDVEPCCWMTYRQHRDAEEALDIFETPDLIGGDPGDDEDLGGKRLGIEDAAGLGGPDGKSGRWRKLQPRMWALFEDPYSSRAARFIAFASLFFILVSITTFCLETHEAFNIVKNKTEPVINGTSAVLQYEIETDPALTYVEGVCVVWFTFEFLVRIVFSPNKLEFIKNLLNIIDFVAILPFYLEVGLSGLSSKAAKDVLGFLRVVRFVRILRIFKLTRHFVGLRVLGHTLRASTNEFLLLIIFLALGVLIFATMIYYAERVGAQPNDPSASEHTQFKNIPIGFWWAVVTMTTLGYGDMYPQTWSGMLVGALCALAGVLTIAMPVPVIVNNFGMYYSLAMAKQKLPRKRKKHIPPAPLASSPTFCKTELNMACNSTQSDTCLGKENRLLEHNRSVLSGDDSTGSEPPLSPPERLPIRRSSTRDKNRRGETCFLLTTGDYTCASDGGIRKGYEKSRSLNNIAGLAGNALRLSPVTSPYNSPCPLRRSRSPIPSIL

SEQ ID NO: 79 - protein, 1187 aa, Mus musculus
MDCSLLRTLVRRYCAGEENWVDSRTIYVGHKEPPPGAEAYIPQRYPDNRIVSSKYTFWNFIPKNLFEQFRRIANFYFLIIFLVQLIIDTPTSPVTSGLPLFFVITVTAIKQGYEDWLRHKADNAMNQCPVHFIQHGKLVRKQSRKLRVGDIVMVKEDETFPCDLIFLSSNRADGTCHVTTASLDGESSHKTHYAVQDTKGFHTEADVDSLHATIECEQPQPDLYKFVGRINVYNDLNDPVVRPLGSENLLLRGATLKNTEKIFGVAIYTGMETKMALNYQSKSQKRSAVEKSMNTFLIVYLCILVSKALINTVLKYVWQSEPFRDEPWYNEKTESERQRNLFLRAFTDFLAFMVLFNYIIPVSMYVTVEMQKFLGSYFITWDEDMFDEEMGEGPLVNTSDLNEELGQVEYIFTDKTGTLTENNMAFKECCIEGHVYVPHVICNGQVLPDSSGIDMIDSSPGVCGREREELFFRAICLCHTVQVKDDHCGDDVDGPQKSPDAKSCVYISSSPDEVALVEGVQRLGFTYLRLKDNYMEILNRENDIERFELLEVLTFDSVRRRMSVIVKSTTGEIYLFCKGADSSIFPRVIEGKVDQVRSRVERNAVEGLRTLCVAYKRLEPEQYEDACRLLQSAKVALQDREKKLAEAYEQIEKDLVLLGATAVEDRLQEKAADTIEALQKAGIKVWVLTGDKMETASATCYACKLFRRSTQLLELTTKKLEEQSLHDVLFDLSKTVLRCSGSMTRDSFSGLSTDMHDYGLIIDGAALSLIMKPREDGSSSGNYRELFLEICRNCSAVLCCRMAPLQKAQIVKLIKFSKEHPITLAIGDGANDVSMILEAHVGIGVIGKEGRQAARNSDYAIPKFKHLKKMLLVHGHFYYIRISELVQYFFYKNVCFIFPQFLYQFFCGFSQQTLYDTAYLTLYNISFTSLPILLYSLMEQHVGIDVLKRDPTLYRDIAKNALLRWRVFIYWTFLGVFDALVFFFGAYFIFENTTVTINGQMFGNWTFGTLVFTVMVLTVTLKLALDTHYWTWINHFVIWGSLLFYIAFSLLWGGVIWPFLSYQRMYYVFISMLSSGPAWLGIILLVTVGLLPDVLKKVLCRQLWPTATERTQNIQHQDSISEFTPLASLPSWGAQGSRLLAAQCSSPSGRVVCSRWESEECPVLPLHPGLPHKARYGCCRSSLEMPT

SEQ ID NO: 80 - protein, 1508 aa, Mus musculus
MERELPAAEESASSGWRRPRRRRWEGRTRTVRSNLLPPLGTEDSTIGAPKGERLLMRGCIQHLADNRLKTTKYTLLSFLPKNLFEQFHRLANVYFVFIALLNFVPAVNAFQPGLALAPVLFILAVTAIKDLWEDYSRHRSDHEINHLGCLVFSREEKKYVNRYWKEIRVGDFVRLCCNEIIPADILLLSSSDPDGLCHIETANLDGETNLKRRQVVRGFSELVSEFNPLTFTSVIECEKPNNDLSRFRGYIMHSNGEKAGLHKENLLLRGCTIRNTEAVAGIVIYAGHETKALLNNSGPRYKRSQLERQMNCDVLWCVLLLVCISLFSAVGHGLWVRRYQEKKALFDVPESDGSSLSPATAAVYSFFTMIIVLQVLIPISLYVSIEIVKVCQVYFINQDIELYDEETDSQLQCRALNITEDLGQIKYIFSDKTGTLTENKMVFRRCTVSGIEYSHDANAQRLARYQEADSEEEEVVSKVGTISHRGSTGSHQSIWMTHKTQSIKSHRRTGSRAEAKRASMLSKHTAFSSPMEKDITPDPKLLEKVSECDRFLAIARHQEHPLAHLSPELSDVFDFFIALTICNTVVVTSPDQPRQKVRVRFELKSPVKTIEDFLRRFTPSRLASGCSSIGNLSTSKSSHKSGSAFLPSLSQDSMLLGLEEKLGQTAPSIASNGYASQAGQEESWASDCTTDQKCPGEQREQQEGELRYEAESPDEAALVYAARAYNCALVDRLHDQVSVELPHLGRLTFELLHTLGFDSIRKRMSVVIRHPLTDEINVYTKGADSVVMDLLLPCSSDDARGRHQKKIRSKTQNYLNLYAVEGLRTLCIAKRVLSKEEYACWLQSHIEAEASVESREELLFQSAVRLETNLHLLGATGIEDRLQEGVPETIAKLRQAGLQIWVLTGDKQETAINIAYACKLLDHGEEVITLNADSQEACAALLDQCLSYVQSRNPRSTLQNSESNLSVGFSFNPVSTSTDASPSPSLVIDGRSLAYALEKSLEDKFLFLAKQCRSVLCCRSTPLQKSMVVKLVRSKLKAMTLAIGDGANDVSMIQVADVGVGISGQEGMQAVMASDFAVPRFRYLERLLIVHGHWCYSRLANMVLYFFYKNTMSVGLLFWFQFYCGFSASAMIDQWYLIFFNLLFSSLPQLVTGVLDKDVPADMLLREPQLYKSGQNMEEYRPRAFWLNMVDAAFQSLVCFFIPYLAYYDSDVDVFTWGTPVTAIALFTFLLHLGIETKTWTWLNWLACGFSTFLFFSVALIYNTSCATCYPPSNPYWTMQTLLGDPLFYLTCLIAPIAALLPRLFFKALQGSLFPTQLQLGRQLAKKPLNKFSDPKETFAQGQPPGHSETELSERKTMGPFETLPRDCASQASQFTQQLTCSPEASGEPSAVDTNMPLRENTLLEGLGSQASGSSMPRGAISEVCPGDSKRQSSSASQTARLSSLFHLPSFGSLNWISSLSLASGLGSVLQLSGSSLQMDKQDGEFLSNPPQPEQDLHSFQGQVTGYL

SEQ ID NO: 81 - protein, 1095 aa, Mus musculus
  VARIANT 801, 1005: Xaa = any amino acid
MPLMMSEEGFENDESDYHTLPRARITRRKRGLEWFVCGGWKFLCTSCCDWLINVCQRKKELKARTVWLGCPEKCEEKHPRNSIKNQKYNVFTFIPGVLYEQFKFFLNLYFLVVSCSQFVPALKIGYLYTYWAPLGFVLAVTIAREAIDEFRRFQRDKEMNSQLYSKLTVRGKVQVKSSDIQVGDLIIVEKNQRIPSDMVFLRTSEKAGSCFIRTDQLDGETDWKLKVAVSCTQRLPALGDLFSISAYVYAQKPQLDIHSFEGTFTREDSDPPIHESLSIENTLWASTIVASGTVIGVVIYTGKETRSVMNTSNPNNKVGLLDLELNQLTKALFLALVVLSVVMVTLQGFAGPWYRNLFRFLLLFSYIIPISLRVNLDMGKAAYGWMIMKDENIPGTVVRTSTIPEELGRLVYLLTDKTGTLTQNEMVFKRLHLGTVSYGTDTMDEIQSHVLNSYLQVHSQPSGHNPSSAPLRRSQSSTPKVKKSVSSRIHEAVKAIALCHNVTPVYEARAGITGETEFAEADQDFSDENRTYQASSPDEVALVRWTESVGLTLVSRDLASMQLKTPSGQVLTYCILQMFPFTSESKRMGIIVRDESTAEITFYMKGADVAMSTIVQYNDWLEEECGNMAREGLRTLVVAKRTLTEEQYQDFESRYSQAKLSIHDRALKVAAVVESLEREMELLCLTGVEDQLQADVRPTLEMLRNAGIKIWMLTGDKLETATCIAKSSHLVSRTQDIHVFRPVTSRGEAHLELNAFRRKHDCALVISGDSLEVCLRYYEHELVELACQCPAVVCCRCSPTXKAHIVTLLRQHTRKRTCAIGDGGNDVSMIQAADCGIGIEGKEGKQASLAADFSITQFRHIGRLLMVHGRNSYKRSAALGQFVMHRGLIISTMQAVFSSVFYFASVPLYQGFLMVGYATIYTMFPVFSLVLDQDVKPEMAILYPELYKDLTKGRSLSFKTFLIWVLISIYQGGILMYGALLLFEDEFVHVVAISFTALILTELLXVALTIRTWHWLMVVAEFLSLGCYVASLAFLNEYFGIGRVSFGAFLDVAFITTVTFLWKVSAITVVSCLPLYVLKYLKRKLSPPSYSKLSS

SEQ ID NO: 82 - protein, 9 aa, Artificial Sequence
  domain
  VARIANT (1): Xaa = Asp, Asn, or Ser
  VARIANT (2): Xaa = Gln, Glu, Asn, or Arg
  VARIANT (3): Xaa = Ser or Ala
  VARIANT (4): Xaa = Leu, Ile, Val. Ser, Ala, or Asn
  VARIANT (5): Xaa = Leu, Ile, or Val
  VARIANT (6): Xaa = Thr, Ser, or Asn
  VARIANT (9): Xaa = Ser or Asn
XXXXXXGEX

SEQ ID NO: 83 - protein, 10 aa, Artificial Sequence
  domain
  VARIANT (1): Xaa = Leu, Ile, or Val
  VARIANT (2): Xaa = Cys, Ala, Met, or Leu
  VARIANT (3): Xaa = Ser, Thr, Phe, or Leu
  VARIANT (9): Xaa = Leu or Ile
XXXDKTGTXT

SEQ ID NO: 84 - protein, 11 aa, Artificial Sequence
  domain
  VARIANT (1): Xaa = Thr, Ile, or Val
  VARIANT (5): Xaa = any amino acid
  VARIANT (8): Xaa = Ala, Ser, or Gly
  VARIANT (10): Xaa = Ala, Ser, or Val
XGDGXNDXPXL

SEQ ID NO: 85 - protein, 7 aa, Artificial Sequence
  domain
  VARIANT (6): Xaa = Leu, Ile, Val, or Met
  VARIANT (7): Xaa = Thr or Ile
DKTGTXX

What is claimed:

1. An isolated nucleic acid molecule selected from the group consisting of:
(a) a nucleic acid molecule comprising the nucleotide sequence set forth in SEQ ID NO:1, 4, 14, 21, 28, 31, 34, 37, 40, 43, 52, 55, or a complement thereof; and
(b) a nucleic acid molecule comprising the nucleotide sequence set forth in SEQ ID NO:3, 6, 16, 23, 30, 33, 36, 39, 42, 45, 54, 57, or a complement thereof.

2. An isolated nucleic acid molecule which encodes a polypeptide comprising the amino acid sequence set forth in SEQ ID NO:2, 5, 15, 22, 29, 32, 35, 38, 41, 44, 53, or 56, or a complement thereof.

3. An isolated nucleic acid molecule comprising the nucleotide sequence contained in the insert of the plasmid deposited with ATCC® as Accession Number ______, ______, ______, ______, ______, ______, ______, ______, ______, ______, ______, or ______.

4. An isolated nucleic acid molecule which encodes a polypeptide comprising the amino acid sequence set forth in SEQ ID NO: 2, 5, 15, 22, 29, 32, 35, 38, 41, 44, 53, or 56, or a complement thereof.

5. An isolated nucleic acid molecule selected from the group consisting of:
(a) a nucleic acid molecule comprising a nucleotide sequence which is at least 60% identical to the nucleotide sequence of SEQ ID NO:1, 3, 4, 6, 14, 16, 21, 23, 28, 30, 31, 33, 34, 36, 37, 39, 40, 42, 43, 45, 52, 54, 55, 57, or a complement thereof;
(b) a nucleic acid molecule comprising a fragment of at least 30 nucleotides of a nucleic acid comprising the nucleotide sequence of SEQ ID NO: 1, 3, 4, 6, 14, 16, 21, 23, 28, 30, 31, 33, 34, 36, 37, 39, 40, 42, 43, 45, 52, 54, 55, 57, or a complement thereof;
(c) a nucleic acid molecule which encodes a polypeptide comprising an amino acid sequence at least about 60% identical to the amino acid sequence of SEQ ID NO: 2, 5, 15, 22, 29, 32, 35, 38, 41, 44, 53, or 56, or a complement thereof; and
(d) a nucleic acid molecule which encodes a fragment of a polypeptide comprising the amino acid sequence of SEQ ID NO: 2, 5, 15, 22, 29, 32, 35, 38, 41, 44, 53, or 56, wherein the fragment comprises at least 10 contiguous amino acid residues of the amino acid sequence of SEQ ID NO: 2, 5, 15, 22, 29, 32, 35, 38, 41, 44, 53, or 56, or a complement thereof.

6. An isolated nucleic acid molecule comprising the nucleic acid molecule of any one of claims 1, 2, 3, 4, or 5, and a nucleotide sequence encoding a heterologous polypeptide.

7. A vector comprising the nucleic acid molecule of any one of claims 1, 2, 3, 4, or 5.

8. The vector of claim 7, which is an expression vector.

9. A host cell transfected with the expression vector of claim 8.

10. A method of producing a polypeptide comprising culturing the host cell of claim 9 in an appropriate culture medium to, thereby, produce the polypeptide.

11. An isolated polypeptide selected from the group consisting of:
a) a polypeptide comprising the amino acid sequence of SEQ ID NO:2, 5, 15, 22, 29, 32, 35, 38, 41, 44, 53, or 56;
b) a polypeptide consisting of the amino acid sequence of SEQ ID NO:2, 5, 15, 22, 29, 32, 35, 38, 41, 44, 53, or 56;
c) a fragment of a polypeptide comprising the amino acid sequence of SEQ ID NO: 2, 5, 15, 22, 29, 32, 35, 38, 41, 44, 53, or 56, wherein the fragment comprises at least 10 contiguous amino acids of SEQ ID NO: 2, 5, 15, 22, 29, 32, 35, 38, 41, 44, 53, or 56;
d) a naturally occurring allelic variant of a polypeptide comprising the amino acid sequence of SEQ ID NO: 2, 5, 15, 22, 29, 32, 35, 38, 41, 44, 53, or 56, wherein the polypeptide is encoded by a nucleic acid molecule which hybridizes to complement of a nucleic acid molecule consisting of SEQ ID NO: 1, 3, 4, 6, 14, 16, 21, 23, 28, 30, 31, 33, 34, 36, 37, 39, 40, 42, 43, 45, 52, 54, 55, 57 under stringent conditions;
e) a polypeptide which is encoded by a nucleic acid molecule comprising a nucleotide sequence which is at least 60% identical to a nucleic acid comprising the nucleotide sequence of SEQ ID NO: 1, 3, 4, 6, 14, 16, 21, 23, 28, 30, 31, 33, 34, 36, 37, 39, 40, 42, 43, 45, 52, 54, 55, 57; and
f) a polypeptide comprising an amino acid sequence which is at least 60% identical to the amino acid sequence of SEQ ID NO: 2, 5, 15, 22, 29, 32, 35, 38, 41, 44, 53, or 56.

12. The polypeptide of claim 11, further comprising heterologous amino acid sequences.

13. An antibody which selectively binds to a polypeptide of claim 11.

14. A method for detecting the presence of a polypeptide of claim 11 in a sample comprising:
a) contacting the sample with a compound which selectively binds to the polypeptide; and
b) determining whether the compound binds to the polypeptide in the sample to thereby detect the presence of a polypeptide of claim 11 in the sample.

15. The method of claim 14, wherein the compound which binds to the polypeptide is an antibody.

16. A kit comprising a compound which selectively binds to a polypeptide of claim 13 and instructions for use.

17. A method for detecting the presence of a nucleic acid molecule of any one of claims 1, 2, 3, 4, or 5 in a sample comprising:
a) contacting the sample with a nucleic acid probe or primer which selectively hybridizes to the nucleic acid molecule; and
b) determining whether the nucleic acid probe or primer binds to a nucleic acid molecule in the sample to thereby detect the presence of a nucleic acid molecule of any one of claims 1, 2, 3, 4, or 5 in the sample.

18. The method of claim 17, wherein the sample comprises mRNA molecules and is contacted with a nucleic acid probe.

19. A kit comprising a compound which selectively hybridizes to a nucleic acid molecule of any one of claims 1, 2, 3, 4, or 5 and instructions for use.

20. A method for identifying a compound which binds to a polypeptide of claim 13 comprising:
a) contacting the polypeptide, or a cell expressing the polypeptide with a test compound; and
b) determining whether the polypeptide binds to the test compound.

21. The method of claim 20, wherein the binding of the test compound to the polypeptide is detected by a method selected from the group consisting of:
a) detection of binding by direct detection of test compound/polypeptide binding;
b) detection of binding using a competition binding assay; and
c) detection of binding using an assay for TWIK-6, TWIK-7, IC23927, TWIK-8, IC47611, IC47615, HNMDA-1, TWIK-9, α₂δ-4, 54414, or 53763 activity.

22. A method for modulating the activity of a polypeptide of claim 13 comprising contacting the polypeptide or a cell expressing the polypeptide with a compound which binds to the polypeptide in a sufficient concentration to modulate the activity of the polypeptide.

23. A method for identifying a compound which modulates the activity of a polypeptide of claim 11 comprising:
a) contacting a polypeptide of claim 11 with a test compound; and
b) determining the effect of the test compound on the activity of the polypeptide to thereby identify a compound which modulates the activity of the polypeptide.
